United States Patent Application Publication US 2025/0205292 A1 - sequence listing, part 2

SEQ ID NO: 2 - DNA, 203771 bp, Lactobacillus crispatus
  source 1..203771: mol_type = genomic DNA
tattcatggtaaagtcggcaatagagatatgcgtttctattgtcttgagcctaataaggttacccctggccctggtacaacgtccaaatataaaggcaaacaagctaccaaagctgttaagcgagttttaatggttggtttcggtgctaactctgcagaagaaatggggttcccaggaaaatcatctgaagcagaatatgctacacaagtagctgtgtggctagcatgcggggcaattcgttcagatattaaatggattaatccaactgcacataagatctttaactatattcaaagtgaagctaaaaaaattaaagatactggtgcaactaagttaaagctcactgcttcaaacgtaaataaagaagaaggaacagctacgattatgcctactttaaccgaaaatggtgaaaagaaagcaggggagggtactttaaagcttacgggtatgactgctacccaagaaggtcatgctgttactaataaggctaaggctaattatgctattaaggttaaattaactgatcctgcaagtggcaaaggtagtcttagcatgacagttacaggtcgatctttgaaagcaccaatgtacaatgctgacagcggaaactcccaagatactgtttcctttgttgctgttccatctgataagattactaaaacttggagcttcgctcctgaacaaaagccatatacgtcatctacaactacttcaatcaaggcaatgtttgacttgaagaaaaacgatgatgagggcgatcaggtcgatcaggccaaatttgacgtttacgagtctgattccaactggtctcaaggcaagttcatcggtaccattactaccaacaaaaacggcgtagccagatcgggcgagcttgatcctggctactatattgcaatcgaacgtagcacgggcaaaaatctggacattaacaagactccagtccacattgacttaaccgaagccaacttgaaggaaaacgccaaggtaacccatgtcaagactccagacggcaagccttacgacttgtatcatctggatgtggacggcccgatcaacaaccacaagaagcccaagatcacttctaaattgaccaatctggaagacaatacccagtttgctcagccgatccacggcccagtagccctgaacgagcatctttacttctcccacctggtggggacggtaacctacaatgttcgtgcctggctgatggacaagacgacgggccagccagtaacgatcaatggccaaaagatcgaagcatccaagacgattgggtcaagaaacaatgacactaatgatgatggtatcgaagaccagactgatttacagttaaagatcccagacgcatcaagtttggcaggtcatgacattgtggcctactcggaaattgcccgtagcgataagccagaccactggacggctttgcacgaggacatcaacgacaaacaggaaacggtccacttctctaagccatcgattcataccaacgcggtcaacgcagaaaccaacggcaagaaattacagccgaccgatggcgagaccatcaacgatacggtaacctacaaggagctgatccctggcaagacctatactttaaagggaattgtgatggacaaggaaactggcaaggccgtcttgaacaatggccaaaaggtcgaatttaccaagacctttacggctaatgacgctaatggcgaagtcactgcatcagttaaatttgacgctcaccactaccgcaaccaccgtttggtagtctttgaaagtctttactacaccgactacctattaacggatcaccgcgacattaatgatgtcaaccaatcgcttgacgtaaccaatccgcaactgcatactaccttaagcgacaacacgcagaagctggtatcgcctaaggccctgaatacggttgaggatgtaatccgctacaccgatttgattcctggccaaacttattcagtcagaggtaaactgatcgaccaggtaacaggtgcccctgtcatgaagcgcggggttcctgtcatggccacggctacctttaagccaaacatggctaacggcacggtaactttaacctttgtttttgacggtacccaatatactggtcaccacctgactgcctttgagagcttgtacacgaacggcagaattttggttgagcatgccaacctcgatgatgcatcacagaccatctcggttgacaacaagcatgacaatgtaaccccaaccccaattcctgttccgacaccaaccccaactccaggcggtggcggcagtaccattattaataacaataataataacaacaataataattcatcaaataacggaaacaataataacgggaacaacggaaacaactcatccaacaatggatcgaacaattccgctaacaatggatcaaacaactctggcaacaacggtgccaataacggaaacaatggctccaataatgcagggaacaatggcaacaacggctacaatggttacaacaatgcaggaagcaacggtgccaacaacggcaataatggcgcaaacaaccagcaggctgttgccaacaatggcaatagccatgccaacgttgtccgtcatgcagttcggactagcaagccttgtcaaaacaagcgagtagctcgtgccaacaatgcttgtcaaaacaagcaagtggctcgtcctaacactgcagtagttaagactccagcccgtcagactgcacctgcatctggctcagtcttgccaactgcttcaatggttgcccagccagccgaaaagacagcttccgcaagccaaattttgccagcacaatcgcctgcttcatcaggcacattgccacaaacaggctcgggcaaggacactatgcttcaaagcttgggcgctgtaaccttggcaagtgcaatcggcacctttgtctacttcaccagacgcaagcagacaacaggcatggaataaggcgaaaagaaaaagctaagcaaaaacttagcttttttcttttgctgtgtgtcgggcatggcatttgtctagtctagtgaaagtctagatcacgggtagttgtcgccaagtgtagcgaaccacaagccgttagcggtgacgctatgggtgaaggaagtggctagcgagttttccgagcctacgtacagaaacctggtcaggccaaatggtggatgagactgcagcacaagttaaagtccaaaggacaaccgtaaaaccaagacggtaaaccagggggcagtggaaaattaaagatgaatgtcttaccccgagagatctcgtggacaggtgaaaccgagtaagctttaatatcagcgatcgtaagcctggtcgaaaaaggttaatcgcgagaagtcagctgaggtcgtagtagtgctgaaggttttgtaatgaaactggagcgaagggcctaatgtttgtaagagcatatctcgctataagcaatgttcagacagtccggataagaggatagcctagcacaaagagaacgtaactctttgatggtgaaagcaattgggacaattctgaataaatttacaagtagaaatggagatatcacgagatggaactaattgaacagattttaagtcaaaataatctcaaggaagcaatcaggagagtcaaaatcaataagggagcgcctggtgtagacaggagaacagttgatgagcttgatagctattttaaaaagcatcaagtagaaataaaggacgccatcatgaagatgaagtatcgtccgcaagctgttcgcagagtctacattcctaaagctaatggtaagaaacgtcctttaggaatacccacggttgttgaccgagtaatccagcaggctattgcccaagtattaatgaagatctatgatcctcattttagtgagcatagctatggctttagacctggacgcagtgctcatgacgctattgaacaagtcttggaatatttaaacgaaggctatcaatgggttgttgacctggatattgagaaatactttgacacggtaaatcatgataaattaatttcaataattagagagcaagtaaatgacaaaaccaccctccatttaattcgagcctttcttaaagctggagtaatggaagatggttgggttaagcctaataaactaggtgtaccacaaggcggccctctttcaccaattctatccaatatctatttagataaaatggataaagaattggaacaaagaggcctgcgctttgtccgctatgccgatgactgcaatatctttgtcaaaagcggtaaatcagccaaacgtgtgatgaattcaatttcatcatggctagaaagaaagctattcctaaaggtcaacgcaaccaaaaccaaagttgtacgaccaaccaagagcaactttcttggctttaccttctggaaaagtggcgaatactggcaagcaaagccaggagatgaccgcaaaatcaagctttatgacaagatgagagaacttctctgtcgcagaaaagcagctgctcagcctctatcactagtctttactaagataaatcaagtagttagaggctgggtcaattactttagagttggcgacatgaaatattttctaattaagttcagtcaatggctgcgtcataaagtacgggtggtaatcattaaacaatggaaactaccaaaacgaatatacattaacttaatgcggattaacaaggcactaaagtgcaattttagtgatgaagatattcataaagtagctaatacgcgcttaggttggtataaaagaagtacgggtcatgtcattaactttctgcttagcccaaaagtattgggcataagcaaagcggatcgcccaggcttggtcgatccgctagaatattatttatctcgtaaataatcacaaacgtagcgccggatacggaaccgtacgtccggtgcaatgagaggggcgagttataaaactccctctactctatttttaattactgcccttcttagcattttatgtcgattctatcgagaatatttaatccagtgaaaaagaattctttatatttttcaagctttagactaacttatacgtatttttaacttgcttgttaacctaatattaacaacgttttagcaaactaatgatttaagaaaggacgatttcttatggcagaaaaacgattaatggatatgcttaaagaaactaagacagataagacagaaaaagcagatactctttctaattcaaaagaagaaagggaagcctcaactaaagagttaaatttagaggtttcaaaaaatgaggataaagaagaaaaaactttagttgaagaccagtctgctgataaagtggaagaggatacttctgaaaaaagcgatggtattcccaaatatgctgaacgacattttgagcgaagcaataatactattcctgactttttggaatcagcagaaaagatacctgtttatatgcgagaatttgttgctcagcatagacggagaatgagttctcactctaaattaagcgaagatgatttgctttatgcctacggtgaatccgtagatacttttaaaacagctaatggaaatttgactatgctgaaaatgcgtattgaagctaataatgctccaatttatgtaccaatgaatcatgcaggtgccaattaccgctatctggaagatttagtcgggcaaaggcttaaagtagcgattgaccaatttgtacaaacaaatgaagctgaggtagacgcagagtatattcttctaggctccttgcaacaagctgagttcgtgattggtggtactcaatatagcgaataccttaaggatccccaagcttaccgtaaagaggtacgtgaaggtgtgattactcaaattattgaacgtcctgaaagaatgatcgtagaagatggcgaacgtaaactgattcctaatcggagtatggtctttattgactatcgtggtatgacgattggaatgcgtgagcaagatttttactatcgtagtttaattacccctcttcataaacgagcttttattggtcaaaaagtaaaattcatggttactcgaattagaaagggcgattatcgtgattccccaactgcacaagaggacgctaaaaatggtatgaatgtaccacgaggcatccgatacttctttgacaccacaagattgccgttagtgcctaacccaagtgatattgtacgcaaaaaactgaatcatcacactattttcattgctcatattgtccgtgtagacagcgttaaaggcatcttagtagaagtagctccaaagtactggattaaaggcgtattgccagctaattcgcctgtacagccaacagctttagacgctacggctcatactcccgtagctgtaagattgacaggaattgattttaagactaagagtggtacttgccaaattatgcgttttccaaaaggtattgctcgtccaggtattgcttcatttatttaaggagggaagattatgccagaatttactaaagatggcagtagcttaaaacaatttaaagataatcttccagtcaccaagctagggttaaatccttttgttaataaagatacagggcgaacttacttaccatcattgtttacagccgaagaagaaaaaaagtttaagatcaaccgcaattttaagcaaagaaaatatctcacactacaagattcggtatctcacatctattcatactttattgctgatgattacaactatgtaatgactcagttgtcagaccatgacctgtattggctaaaatttattgcacgttttaagagtattcaacaagtgcaactttttcgtcaaacagctttatatcccgattggttcgatagaaaaagtttaaagcattcactagaccgattatttatgtatggtctgatttggaaatggaactttaagcgagactttctaaataagcctgttacagcctatacactatcggttaatggctttcgctttatggagtatttctttaatcaagaacgcagatattttcagccccaaagctattttactttgccagtgcaatatcacatccgattctgggaaactgttgacatttatcaattatgtttaagcctaccgatctttcatggctttgagactttcctaaatttaggcaaagataaagaaaataaaatcaaacgtaatatgacttcgcctttgcaaattgctttagaaatgattcctaatcaaattaaaaatttagtgtttttcccagctttgcaaacagatgatttaacttactatcaaaatgcgttactcagatggaatgcatttacggatgatggtgctaaccttactgaatcggtcaatgggttacctggtacacaaaatattattgtcttttatgctccaacagttgccatagctgataagttaaatacggatttagaacttcctaactggaactttcctattttcttattagttggatccgtaattgaaaaagatggtattacacaagctttttattatcccgatcatcgtaataaaactcttgatttgcaaagagctactttacccaatttagtgttttacaatcaagaggagagtggcaaaaatgaagaaaattaaaaaaactatcttactatctgtgattgctgtttgctcaactacttttttgacagcatgtggcaatagggcaactacaccagttgctcaacaacaagccagaagatccagtcagcagaaaagtgttcagctgggtctctacgtaggcgacattgctcagtcggagaatgtattatcaatgcctgtagttgttaataacgcaggtactgatagcacagtaatttcatcgcaaaacttcactttaataattgacggtcataagtttaaagcttttcaagtcccagatgaaccatctgactttcaccaagacttaggtaccacgcaatcttggcaaaatgttatttcattttatataggaacaaagctcagcaattccatgctcaagaaagcacagctaacttatcaagctgataatgggtctactgttaaagcacaatttcttagcagttccaatgcacaatctaaattgcagaatgtaacttattctggctatacttcggtaccagattattatgctaaatctaagcaatatattgataatgcaaaggaaactgttaagacaggcggaagtgccaactccttaaaagatgggctaggggacgctaaatatgaccgctttagaatgtggggcgttgcctcttcaaaattttcagatttaatcattatcaaagcgattaacaatactaatactgacctgcttctacctcttaaggattttgagttacaggacaaggacaagaacgatatacaagtgcatcccacttaccgtagctataatgtcttgattccacatggtaaggcagttaatgtagtaataccaatggaagcatcccttaagcatagtgaaacgccatataagtttttgtttagagcaacttccagtagttcctatcaatcgtctgctgatacattccatccagcagagtttgtattcaatgacgctaaagactattccagtgccttggcaacaacaccagaacaatatccaaaggatagtattaagtggtcacagatcaaactgaccaaagatacattaaaggcaaaagtaaccttgtatgattattactttattaattcagatgcttctaagtatcgcttggttggacttaataatgatagaacggttggagactctgaaaagcccgactctgtatcgccaactaagataacaggtagtggcggtgaaataacatttaagtttgatgatttaacggtacttaagtcttataagaagatagttttgcgctacaacgatcaaactctatttaaaattaaataacaaagctaagtagtaattttcattattgtgttattgacaagtcttaaaaattctcttaaaatttttatagaaagtttaagtttaagcattaaaagacatataaggagcttaatcatatggagaattataagattggcaatttaaaatatttgcaacatattgatcgtatgaagattggtccaagacgtgaaccgttaatggaacatgtcaaacattgtccaggatgtagagactgcattatgtggcaagctgttttaaaacaaaaagctgaattgctagatcatcaagaattagcaggcggtatttccagagggcaagcatacgcaatgcgtaccactcatacgattcaatattactatcccgaaggtgacgagattaggaacccagatggttctttgaataagaacgtctacttgaaacttaagaacgttgaccgaggaggtagtgaagataaaaagggcggtggctttaccgatccagacattttccaatattttcacatcaattctggtgaatcaggcaagtttaaacacgaaaactttcctgaatggcgcgataaggataagcgtacagagtacctcgatggtgacggttatgacgctattaagcaatataatgaaaaatacggtgaacataagacaactcgtgtaaagcgggatcttaagttccattaattaataaagtaatttattaaagcactacttagcaataagtagtgcttttttgtgttttaggaggttaaaaatgagtatgtactcgtcaaacgagaacatcttaagaccaataagtttggctttagttgatctttttgctcaagcttccgaagctaaaaccaccattaagcatttaaaggtgatttacaagttagaggataagagctgtatggttgacgctaagctttctagtcaagtgccaattacagagattactaatgctttaatgagtcaaattgattatttgattaattcgctaatttccaattatcaaactgtttatcgtaataattatttgagcaaagtaatttttgaagctgaccttgatacattagggattgtttatgacagtgttaaagtgacttgtgttatgcgtgccaatcttaaaaacttggatagcaaggatttgatattgaatgctttagtagctactgtgcaagcagaacagtcggaattagttgagcgtcctgtaactggcttaaaattaaacttaaagcgtaaaaagcttcgaaattttgctttaatatttgattatgctaaagatccgcaagagagagtttatcaaacaggctttgttaattcattgattaagtctctttcaactttgatacaagcttattgcagttttacagaaaggcatcaagcaagtattagtctatgctttaacttgttaaaccgcaaaaatttgcaaatagcgcaaggtcagatttatccaactaagaagctcagactttttaatggctttgttttgccccaggaagcaaagtatctaattaagcaggtcgatcaaattttaatgttggttggcaattcaaaagtcaatggtttgcaattgattcggcatcccaatggtgagtatattagtcgttttcagattgtctatactgctgatgatatgattgctcaaaataatgttttagatattaatttatcatctagccaacaattagctaatatcttgaccaaaatcattgatacttgttcattaagcaaagatctgcatgattggaagagtattatcaatgcagatatgcagttagtctgcaatgagtggaaggtaaaaagtaatagttatcaactaattcattcatttaaagatccaagtatatctttcaagtcggctaaatttttgcttaatgatgtaaataataaggcaaaaggtaaagcagttattaatagcttttgtttagtaacacagcataaaggattacgagagctaggcattaatttgtctcagcatattaatttagaacagcattcccatcctatgcaggttccaactttaaatcaattctttaagccaaagtcaaaactttactataactttgctttaggcagtggtggctatgctttacagtcggaaagatacttggggtgggctaaatcatgataaataaatacgcgtggtgctagttaaatcgttttagttaataaaaaagtccaatcttgttagactcaacttgtataataatagaaaagagcctgatctgattgaactgccttaagcttaagcgttttagccaccatttacaagttagttttaaagatttagtgataatttgtcggcactggtatcgtttgtatgcaccggctgagtttactcatcggcgaaatattgatcaaattaaaactacggacagtctgattttggctttacttatctggcaagctaagacaggaattgaatcacaaagaagattctgtgaatgtttcaattgtttatcacactcacgttttaatcgacgttcacgtcagctattgcaattgatttatcagatacggcaagaaatgaataaaaaggttgacctgaatggacagttcttgatcattgacagctttccggtacctgtttgccaaccaattcgaaactatcgtgctaaaatttttcgcggttatgccaacattggttataaggccaccaagaaaatttacttctatggtttcaaagttcatgtcattgttagcgatgacggttacattcttgattatgtcgtaacaaaagcatcagttcatgatgccagggagacagttgaactgctggaaaatacccatccatctaattactatcttcttggcgacgaaggctatttaggcaaagaactgcatcaacagctaaaacaaatgggttatgaactttggacaccatatcgtaaaaatatgacaggagctaaaaagcacaatgatcatcaattgatggctattcgcagaacaattgaaagcgacttttcgcttctgacctattacaatgccgagaacaatcgagcacgtagtctgataggctttcaaagccggttggaaattgcaattttagcttataatttggcttattgtctagaacgatttaactagcaccacgcgtaaataaatatattttgtttctggtagcagggacgaataaactgaaaggctttattaaccaaaagtctaattctcacgtgaaagatatctttaacagaccagttgaaaatcatgggaattttcaacctacgattgatttaattagaatgctaagctcaatcagtcgctataccgactggatatgcttatttttgattctaattggcttaggcattgtcgttagcagttattacggtaataacggtaaatggcgtaattcaggttatcggatgatttggagcggatatgcaaccgtcattattatccataccattattattgcaggaccatccgtagggaacctaggtaacatgaagctcttgatatttttctttatgctgttaggtcaattactgttctatgtagcaacttcttcgctgtacttaatcggttcccaacagctagaaatttatgagatgtcaaatcaaccatctaatgagcgtaatgcaactagtatgtacaatttcatgatggtaacgatgattgctggagcggtagcttatatgattgcggggttattctaatatgtttaaacaacacttagatttaattgatacatttttaaagtggggcttggttctatttgtatcagcctttattgtcggtttagtaatgtgtgctttcaatggatagataatgatgtttcataatttactaaaagaagataaaaaacgagacgataagcttctcaacattgagagcgtagtttttatcatcatgattgtttgtgttcttgctttatttcctgtctataactttttcaagcctttttttaagtggcttttactcctttttggagtttgcgccctaattggcttcggaatccgtatgatatggagagtaagagatattaagtcttttaaagataatgtctatatggacatgtttgaaagacaagagcaggaaagggcggagaaaaagaacaaccatgaaaaagaaaagtaatacaattaagcataaagtagttgaaacactgaaaacgattattttagcgactatgttttatgtgggtgcggccttgctgtttttaggatcaggaattggtcgctcttatatggtcaaacaaaatgctcaagtagcaagtaagaccatcactgttaggactgctgataaaaataaaaaggtcaaaacaacttatgacgctaaaaagacaaaatctattgacgcacaagaaatttggcgagctaaacaatacccagcctatgcaatcggtcgaatgtcagttccagtcgtcaatattcataatccactttttgcaggctttggcggacataatcaaaatttgagttatggtgtagttacagtggttccaggtagaactatgggtggtatcaataattatgtcttagcaggtcattatatgggatctgctggtcctgcaattttggataatctgcactatatgaaagcaggagatccaatttatgtcaccgatatgcataagatatatgcttatcaaactaaatccgtatcttattcgattaaaccaactcaaattgaagttgaaaacaatcaaaagggtaaaggaacaattactttaatcacttgttccgattttaatatttctcgttatggttatggtcaacatagaacggttgtgcagggtgatttaattggttctctacctgctaccaagagtaacttagaaaaaacggaacttaccgacaaagctaaccagtcaagcataaaaatggttaagcatactaaggttctaaatccatttacgaagaaaatggttacagttagaaaacctgctcaaactaagatttatcaaaacgtaacttataatcaaattaaggcagttttttcagttatagttgctgtaattgttttgattcgcttactctttatttggatcccacgcaagaacaagattgcatagaatattgttggcagattatgaccaattaatgttataattaacttgtaaatcattattgaaatttttattttttcagacagctttaaaaagttgtaacagcgtcacatttgacgtattaggtggtttatttagttttattgcttccattgaagcagtagtatgtcttaatgtagttcttgatttatcgtttggtaagtcatgcgtaaaaatttttaaaagttagtaagtaattaaggaacattgagcattttcgatgtttcttttttgatatgtaaaagtgaaaggtgtgattttaaataagaaattaacattaagaattgtggcgtaagtaatatttttatggaagggaaacaaaatggtaactaaattatcagagcttgaaatgcgttttggcggtaacttaactcccaatggtatgaaggacattgattacaaaaatcaaaatgtacacttcttgcgttttgcaggtgcattttgtcctatttgtggtcataaaacttggtgtcaagtcaatgcaactggtactaagattatctgtcaaagagttaagcaaacaaccgaatccattaatggatttaagtatgtcaaggatattaaagcgataggcggctatctgtacaaattggtaaacctggatgaagcagttaagtttgacgctaatgcgatcaattataaccatacttttccaatggcatccccaaaagtaacagataccatgtatcgcttattgctccaagcatatccattaactcaatctcatttggaaaatctcaaaaagcgtgggttaagtgatgaagatattaatcttcatcattcacgtggcttcggttctttttatttaaaaagggcagatggtaagccatactttatccaagctaaactcaagccaagtgatgatggcaagattatttgtctttccagatggaataatgtcctcaagaaatacaaattgccagagaatctatggtatggagttccaggtttttatttatcaactgctagctttaggggacaagatttttctttccctaatttttcaacagtgaacggtaaaaacgaaaagcacgctccagaaggaatgttgattccttattacgatgaatataatcgtattcgtgcttttcaaatcagaatagatcatcccaagaaatatgcagtcattaagcaaggcttacgtcttaatgaaggagatttaaaagtctacattaatgatgatgatacatattctgtttattgttatgcgtttggcaaaaaagaaatgattgctaaaggcaaattagatggtaaaaaggaagttactcttagctatggtgttgacgtaatgaaggaaaattatacttttgaagtaagttcagaagctaaatattattgggtttcttctctttcagagaaagacggtgctgacactactggaaagtggcctgttcaagttgcttataatccaactgttgctcagctcaatcctaataatcctgaagaacgtcaatgcttgcaaaaatatattgataagcctaaagcaatttgggtaactgaaggtggtttaaagggttacattactgctatgaaattatctaaagcttttactaaagaacaactagatgattacggtcgtgatgttttagctgttgctggtgttaattcttaccgcaagttcttgcctatgcttaaaaagttacatgtaactactgtaacaatcgcttatgacatggacatgctacaaaacgatcaggtggcagataattactccaatttaatcaatatgcttcatgaaaatggtttcaaagtacagttagctgtgtggcaaccagataaagcaaaaggcattgatgatgctcttagtgctgggattgaagtgcaagtaacaccgtataaatagctatctttctgaaaacaaactaagtattaaaagaagaccaatgaatcaatttgatttactggtctttttgtgtttagagcgaggtataaaaatgtatttgttacttttaacaaacgatgaaggcaaaactagtcaaattggcgaatacgaaaatattgtagacgctatttatgaaatgaagaaactgcaaaccgacagcttctaattctaatctggaaattggcattagggacttatatcatgaagaaacttatcggattgtctatcaagactgtcagcaagttaatcatgaaattcctgaattaaatgacttgattggtgaagcagtcttaaacgtgcaaaacaaaactaactaatgtagtttattaaagagaggtattaaaaatggaacgggaaacttacactaacctaacattaaagctggagaaactatacgatcatgagattgctttcatcatgaagaatgttattccaaatgatgatggctcccatagttggattaaacgctcagccaagattaagacagcctatgacattttaaattttgtcttggcagatgatcgggaatttgaagaatcactttctttattcgtgaagcttgatcttggtacagcttttgaagcagtcgtttattcaaacgcattacaatccgtttgggcctcatgtaactatgaggacaactggattaagctattgaatagcgcactggtcaatgttttcaaagctaagatgttgcaaaagagtagtattaatcgataactaaacgattgatataagtattattaggaagaccaataaatcttgattgatttattggccttttttgttgttaaagaggtacaaaaatgaaagaaaaaactattttgaaagatattgttgtcttgcttgaaactttggcaaaaaggtatgagtttcaaaactgtcaacgtgcaagcgtagatattagagatcttagcaattctgtcttgcctagagaaattttttcttgtactggcgttatgacagtcttacttaacaagattgagatggtttggattgttccaaatacacgctttatcttgacgactaagattcaaacgggagctttcaaaaattgtaaaaacaagaagcagattaaagataagctttatgcatcgttagctaattacttcgttaacttttcttatccagattgtgacaagagtaataacaatgcagttgtttacgtattggaaaatagttttgtcttagataaagctaaagctgagcaagccgttgcttttttgcatcatgtcggtgcatcccttaagcaggactatcctagtaacgctgatcgtataaatctgttttaaatgacgagagaggaataaaagtcatgccagaaattgaaacgtacgatgaattaatctcaaccgaaaaggggctttttactcaggacgacttaaccccttcaggcgatattaatggtaaatatctaaccgtgaacggcaaagtttatatgtgtgcctttgttggtatgcatgatgtctttggtggctatctgttagttatatttagagttaatggcaagctattggcgcttcacatcccacgtgaagatcttgctgatctagcaggtgatgattactttgaaagatctttcgatgaaaatcgagatattcttgagaagttaattaccgttgatccagacgagtacgtcaatgattggggtttgtatcgttacgcttagaaattatgcaatagagaaattaagtaataaatgtggagagaagcttgtgcttgtctctttttatttttggaggtaaaaattatggaaattaacgtttacgtaagttcattaggtgcatacaacgcaggtgaattaactggtcaatggactaagttgccagttgctagtgtcaaggaagacatcattgacaagatcaatggtgctgttggagatgaatactttatctcagactatgaagctccatttaaaattggcgaagatgattctttggaaaacttaaataagcttgctaaagcccttaatgaagaaaacgttggtagtcttgaagacttgtattggaaacttcgtgaaggtatcggtacagatgatactgttactcaatacactcggtatgatgatgacagcgatcttgaccagatgcttgcaggagagactccaacccaaattattaatgatctgggaccgaagtttaacttgtccgattcatatttatattgggagaatggatatttaaacacggcaactgaacaagaatttcaagcggatcttaaatttatggctacagatcttatcaattcctttattgataaatacaacagtacttacgaagattcaattagttttattaattaatgatgccgtaaagttagaagataagaaattagaaataagtatttttaggagaatgatttaaccatcattttctttttattttgaaaggaaaaaatcatgaaaaacaacattaagaatattgcggaagctaaagctgtaccagagatgtcaagaaccgagcttcttagcgtaattaaagaggatttagtttcaaagggtattactactcttgattatctgtttaatgacctaaatgaaaacgtgctttttgatagcttaagccctgttgctcaacacgcttatgttaaatttcttgctgatgaattatctgataagtcagataaattcatgaaatttacttcatctgttgaacttggcacatacttagcaaataagtacagcaatctggagcatgaagaactacatgttatttcggttgatattcataatcgtgtattagctgatgattgtattacagttggttctattgatcgcagtatagcagtcccaagagatgtatttcgcagtgcaattatgaacaacgcagctggattttttattatgcataatcatccatcttgtgatttacaaccatctcctaatgatgttcacttcactgaatccatcagttcacttgctaaaacgatgaatatccgtttcttagatcatcttattgttggtggggggagttacctgtcattaagagagaataagattttataaggagaaaatatgattgaagtaacaaagtctgcttcctttgaagaagtagcaaataatgtaaaacaaaattggaaattaattgctaaaagatacatccctagcgatgttgaaaccaatgtttatacttttaaagatataagcaatggcttaggctttaatttcaaattgccccatgaaaataagcatcactttaaagttgaggtcagactttcgttagatcaattaaagccacaaagtactcaaactttgcagagtaaattgttgaaggaagtcggtaaacagatcatttatgtagtcggcaattatcaaattgacgaagcttatgatcctgcctttacgaaaaaacatcattatggttatcggcagttggaagcattgcatcaggatgaagacattatgttggattccgcacaagcaatggttcttggcgctaagttctctgagtttaatcagagtgcagacgctaaatatgactttctggcaccatttaatgataatcagattgatttaattaaagctgtttacagtaatttaattaaaaaattcgatttgatcgctaatgtgattagttttggtgggtttagcacttctgtaagcaattcaaagtacctaatggctacgttgaagtttcaaagaatcggaggttctaaatcttttaccattaacattttttcaaaccaagttcgtaagtttgcagaaaaatttgcagaacatggtatgggcgaagagcaagcaatttatttcattattcgtacctacttgagtaaagctgttaaggaattctctactaatgagaatctagctccaaacttagagctagataaggaatcatacattgatatgattgctgatttccctaaacagtatttcaagcttttcgaataatgcttaagtaatagaggaataaaaagagcaacacataattttgcaatgtcattaagttaagacattgacaattaatattagacttttaaagcactgatttaacatttaattggttaaattggtgcttttttcgtacaacaaataaggcatagcacagattctgcttttttaagctacgcgatataaataatatacagctgatttgggcttaatatttctcttgtccttgcggcctggtctaattggaatggtataatagctgatctgaataaggatccgttcaaaatcttgcgttaaagaagaagccaaatacatgctctgaataatcaagcatgattgcttgaaattgatggcatattgatacttgcaatgcttttgcggaatataggcctgtgcatcaatttgactgattgcattaaacataatcatatgggcataaatttccatttcaataaatttatcttgtttggaatggaactgtacactgcctaaagaatacttcaatttcttgaaggaggtctcaataccccaacgcagatgataaagctctttaattctttttagcggataattttttcgatcaagattggttagcacaacttcccattcttctttgcctgatttggcatcattaattctaaatttgcaggctcgaaattttattgtgcataactcgccaaaatcccagcttagatcctgggtatttttagagcgatacttaatatattggcgataatgatgctggacatggtgaatattctcactggctttatgcgtgatgtagtaatagttagaagtagttaccaggcaggaaatctcacgatcacattcttgatcaggcaatgtcgttatttctttaactccgccttgtccagccttagttcgtattatgtaatgacagttaggcaggcgattgcagttttcaatcatattgaaactagtgtagccacgatccattgttacaatatatggaccacaattcaaagctttaagcatttgaacagccgctttgcgttcatccatttctgatttaggctgaaaaatacaatcctggtaggtattattcaatagatcatataaggcattaacgtgaatttgacaatagggtttctttttatgagaagaagcttgtacaatgttattcgatttcggattccagatttgattaaagtcagagccatcaatggcaaacaaacggtagtgatgatcaaaaagttgaatattaaatagattttgattaaaaacagtcagaatatgtttaaaacaagcaggagaaagctggcttttgcgttgaacataggcagaagtactaactactttatcgttctttttagttgcatcttcgccaaaagctctaaagagttcactgtttaaattctgaccttgcatgttaattgtagttttaaggactgtcgctgcatctaaagtgcgtttcctggtaaaagcatgaggattattaataaaatcgtgaatatgatccccagtattattgataatttgatcaagacgttctagaatattcttatgaagggctttcataattaacaccatctttctggcaataattttgaaggtttaaaatatataatatataagataggcgaaaaggctggtcttttcgcctttattttatacaaaaaaagagatcgaatccaaatgattcgatctctaaaaaagcacccttaattgtcaatgtcttaacttaatgacattgcataattttgtgtcgctctttttttgcatggtgataattatgacagatgaaaagtatgagcaattaaatttgtttgatatggtcaatgcaatagccgagacacctaaacaggataatattattcccttgagaaatgaggctcacctagaggttctgcatcttaatcgtaagttttattctgctaaggcaaacctgtatggtaaatttaagcaacttgctatggcaatttacagttcttacaaatggactgatgaacagctattagaaagtgcaaaaatcatttatccatatatcggttttcggactaacgctaagaccagtaccaacaaagtaaaagatgtaatttttgtttctgataaaaaacaacaagaactaggtctgtttggtaaaagtgaccaaacatattgcattcctttgtattttagaatgcaagagaatgaatattatagacgcttcttgattttgtcagacgcatcagaactttataaacactatactgatacctactatcgcaagcgtaagccttttgtacgttactcctatatctctaaagcatatttgcttggttatgcttatctgattcaggcaattaagtctgaatttgtacgcactaaagatcagcatttaatggatttttctgagatggagcttaacgacttaattaagggtttaatttctggcgaccgctctactaactatgccttttatgattatgctattactaatgcacaaaccattaaaggctggcaaaaagacgttgctactaatttcacgcttgagcaggatatttatgctaacttaggtgatgataaagcaatcctccagtgggacggctatcgggattttgagcgtttgctagcgttcgttagaagttatcttgacgataaatttaaaattattccgactgcatcactaacgcaggctaaagtccaagctgttttgtaggatcaaaaaaagtcggttctctttttattgagagaatcggctttttctttttgctctgattttgaatcatctattaattttagaaaattttttgttggtaattttttctaaaactaataaagatcattcgattgctcttgcattaactcaatcttacgatcagttcgataggttaggctaatcgatacagcacaaatattaattaagcaaaaagcaaatatttgaaaaaatatacctagacctaaaaataaaaaagtgctttgttcggggctatggacatcacagaaaaaccaaaacatgatttctgaaagtaaatcgcatcctattccagcgtaaaatagaatctcattgaattcacccgaatgtacatcaaagacataacgtttgataaattcttttctgttaggccaatacttttttggcaggtttaatttgataagaagcaacaaaattcctgcttgaattagcactccaatattaatcattgttgcaagatgaaaactaaaaccaagtaagacattaatttttatactcatttttccctccgatttcttttctttcattttagaagtaattaataatcagaagggctttactctattttgggtattttagtttgaaaaagaaggtttaaagtcgctaattaatggccttttctttcggttctttctagtgttttaccagttgaagtgaaaatattgttttgacattcctaaaagagtcgcaatgtcatgatagctttatgctatcttttttctactttttcagtagattgcaaatcaacctttagttttgattaatttggactaataaaaggctaaaatgttttttcattttacaatttaaatacaccacatgtagtgcaaaacaaggagcatggttatgacttatttgaagagagcatcaaaggaaattgaagaaccgattcttcaagaaacacgtaaagtaaatgaacgttatcggttacctacagaaaaagatttaaaagtttatttaattctgcaagatgatggaagcatctatttgactgatacaggtcaagtaggaatgactctgctttcagatcatgagttattgcatagaatcacttcgggagaaatcttttctgtgaatggtgacattgaatgaggatttttcctactttatagacaaccaatcgtattttttactattaacttagaataatttatgtagcaaaaatgcaaatcagattagtcattaattcttctgacagtttaaaaggcttatagagagccatgattcaactttctcctggatgtaaaaggagaaaaaaattgtggcttttcttttgcatttgaactacgaattatttttaaagaaaggggtaagggttatgtcaagtattgcaaaaacttctttcagaacgtttattgctgaacacgtgaccgccattagattttggattggccttctttctgcctactttggcactaagttgactagcgtagttgcttttgcacaatacgatccaagctcaagaacttctggcgactctgcaggtgctaaaacatttgccgatattttcttcggtttcttaggaccattgcaagactttgcaaccgttgttcttatcttgtcagcggtcgtatgtgggatgaagatcggggcatcaggtatggttggtgatagccgtacaagaacaaatgctatcgttggtctgtttttcatcattgttggtgaagttgttgtccttcacgctcaagccttagtcgcaatggctactggtatttctgtcaacggtcaacaataaacagcttaagcaattaagcaaattgtcctagtaaccgcagggagggagtgttttacacaatgggtggtagcagacaagttttaatcgtaaatttatctggcgcacagaaaaaggtattagggtttgcgagctggcttcaagtcggtattacagcaagtggaattattttaggaagcgtcatttatacaatcttaaataatatcttgctttcaatcggtactggtgttggagcttcaatcgtaattgctggtatggcatttgtagctgtactcgttccatttggcattgtagcttttaaacccattcgtgataaacagggagacctgctttattacgagagtacccagttaatgattaattatcgttttctaagacgtgaggttggaacttacattaatattcagccaaatcggcatcctgtaaatgcaagattgccttatgtaaaaaagagacgaattgattagtaatttaatagaaaggagatattaatatgccacgtaaaaataataatattaaaagacttaacactaaacgaagtgtagggaataagtctggtttgactctgattcttacttttgttgtctggctagtttttttcttagacatgatgttcgtagctcataatgatccaattattatcattgtcgtttctgctggcatctgggtcttcgggcttatcttgatgaagcctggtaaatttgccatgagtgttcaacaaaatggattttggaagactttgtttggtaacggcactaacgaagggcaaagaagaagaagacgttagaagtacgctaaattgagcagtcaacccatccaacactaggtaggttgactgtttgctttaacgctaattctaaaagaggtgtctaaaattttagtatttatatctattgttgccgtagttttagctcttactattgggggctacattatgtggcgacactcgcaaaaaaagaattttgatttaactccaagagatcgttcaggagatgaattagatgatgatgaagatgaggatccatctgaaacccctgagtacgaagacgatgtaacctttgatgattggaataattgggaagatttattgcaggaagcaggtattgttgacattcgggatggcatgattgagtacgaaacaggaaataactcacgaatgtttattgccttagccgaaatgcaacagtctaatccatttttgaaaactgatgatgaactggcacagcaaaatgctattcaagaagtctttttcaatggtttaaaaaatcctttgaaagaaacatctcaaagccagcgagtggaaatgaccgactttttaaatcgtttaaaggataactcacagagaattattgggtctaatccgcagatgaagcaatatgctcaagaagttattgaagacactttgaggtatcaaagacaaactgatcgttttgaaaatagagcttatttgcaatttatggcgattattaatccagatgaagtttacggggacactcctgctgttatagaacaacagatacatgaaaaagcggccgaaaaactgattcgtcagattgatcgtggtaatggtttgctaaagcgtgctgaccatgctttagctcagcttgatacttttggtttattggaagttatttataagacgtttaatcgtgacagttcagttagggtgcggttagaggacgttgttcgtcagcagaaatttcaaatcttctctagtgcctttcaatctgataagtactttaaagatgttcaacaacgtattcatattgaaaccgaagcaattaatcgggcaagagatattctgcttgctcaacaaaagaagcataacgaagctatgctttctcaaggcaaggattattacgaagatagctatgatgaagataatagctcttcaatttccacaaatgtaaatgagtatgataattccgctgatactgacgatgatgatatttttaacccagatgatttcaaagatttaagttaagaggtgttttaaatgagtttagcttcattgtttaagaaaaaacgtgaggaacaagatcttccagatgatgaacaatatacggatgaagaccagcaagactatgattcagacgatgaagggtttgaacaagcccctgaagaggatggatatattgatctatcacaaaatcctgcgggtactggcaagtctcctgatgaagaagacgatcaagatccagaagatgaatactatgacaatcgggatgcaccaacaactgttctaggtcaaccatctttgctaaatgttattggtccaagctattggtcaacagatgatcttatgcaagatgagtttattatgcgtgaaaatatgaagtctaagacatatggcatagcggcttatgttcccccaagtggatatcctcgtatgcttgatactcaagtctttcaagagcttttagcgcaaggaaatattgatttaacccttgatattgtccctcggacacgtagagatactatgcatgatttgtctaacatgttaaacgtaattcgtgccaatgctgaatatcaaaatgaaaagggtcaaagcttccagttacgtgaaaacattgctaaatacaacgatattgataacttgcttgacgaaattcagtttgatgaaaaccgtctttatgatgttgcgattagcatgattgtttggggaacaagcgaccgtgatgtcaataaaaactttggtgttgcgtcagacttattagccaacgaaggtatttctgtaactccttatgccaaaagacaaaaatcaggctttcttaccacgctaccgctaggtgcccgaattagttatttagatgatacctaccgtaacgtagaccgtaaatctttagcggtcatggatattgcccgtaatgcgagtggcagattcaatggtggtattccctttggaaataaccaagctacaccatcacaaaacaccgaattcttgaatatctttggtactgaaacccaccgcccggtaaattacaacatgggaattgtaagtgaatctggtggtggtaagtcagcagccaacaagattaagattgctagggaagttgctattttaggatttgaacatcgctctattgatcccgatggtgaatatgttctgttagctaagaaattagggcagttgaacctaacgattaccgctaatgcaaaatttgtaattaatccatgtgccttgtcattatttgaaacacctcttgaagaagaaacaatgaccgactcaacagggcatcaattatctcctgctgaaatggaagaacaaattcgtttaaatgatgatgaccatcgtcaagtggttacccataaggatggtactaagtatgttcaccaagtaaacatttctcaaaccacttcaaatatcgaaggttttgtcaacgttatccttaccagtaacggtgacgaacgcaagatgaacgtaggtgagaagaacttacttgataatgcgattgattctgtaattgatgatttacaaattaccgaagatcctaactcactttatcttgataaagcaggaatggttaacgacgtttatcaagatcatcttccaaagcctgaacctacattaagtgatatttatcaaaagcttgtcttacaaaacacagaagaagatggtcagccaagtgctaaagtttcaagactgcttgacgctttaaagctttacctaagagatggtaaacgtccaatctttgatggtcagactttctttggacgtgggcgtagtccattgttaaatgactataaatacgtaaactttaatatttcacagcttgagggttcaattaagcgtgtagcttactatgtattaacacagtatctttgggaacgctggatgaaaaatcctgctaaagcaatgactaagaaagtccttgacgcagacgaaattcttcaatttattgacgatcctgaaatgtcagccttctttgaagttattgttagacgtgatcgtaaacgtaatggctctattacttggattacgcaggatattgaaagatttcagggcaaccctaaagctaaagctttagtaactaactctgagtttatgtttgttttagccaccaagccagaacaccgacaattaatgaaagaaacggttgatttaaccgatggggctttagatattttgactggtaaccccgatccaggtgaaggaattctccgtgaagaaggagaaagcatctggattagaactaatccaagtcaaaaagaaatggacttcgtggaatctaaccgtgccgttggtcaagctcgaaagaatagaaatgctatcgaagcgatcaacaaagcaatcgaagggtagtgatgaattgtgcatagaatactagaatggctccaaaatgtaaattggggcaaattcttcaaaagattaatcatcagtttaaccgtggcagttgccctttgcggtattggaattgaagttaaaggattaaccgtacttgctgacacatctagggttcatcttaatattaccgataaacatggtaatttagactggtcgcataaaacgcttaatattcttaaagctggttgggatcaaggtcttgattgggttaaaggaaactttaagcaattcggtaatcattattctactggtggttatgccaacaatgctcaaacagctaaatcttggttaaagcaaaaaggtaaactctctaaagagcaaatacatggtagtcctagcgatggtaataccagtttggaaactgaggggttgtacggttatgcgaaaaaattaggaattgaccctaaagcatatagtagcaataaatcactccttaaagcagtttctggtattttaaacaaaagggcaagtcatgaagacaaagttggtagtagagaaaaagacggttactacgtagggaatattggtaaacaaacagcaggcgagaaaaaagcttggaatactttgacagatggtctgcttcaagcgcgtaaagatctaacaccgtctgctgagaaaaaggttaatgcctacttgaaaaaacacggtggagaaaaggaaactactaagtggtataaggctctgcagacagcgatggataaatacgcaactggtaaagccaaaaaagaattgaataaatctgagaaaacttcaaagaaacaatatgaagattctgccaatggtccaaagaaggcatccgctgatgatgtaaagaaaatgttagaaaaaggtgaaatgcctgaacctactaccctttggggtaaaattgggaaagccttaatgaatgctttttggtcaagtacgattggaagttggcttgaacagaatggtgcaggagctactatctttgcaggtgaaacaagcgctcctcaactagctagtgatgttgaaagcaatccatatactttgatttatccgatttcatctgattacagtacaatgagacaagtatctgattggcttcaaccatcaatgattgctttaggtggggctttaatcactcttgccttggttgtatcttcgatgaaaatgggatggggtcaagcctttgatccagttcgttcaaggctggcttggtatcaaaatattattgatacgatgattgccgtaatcggagtagctgcatttcctgcctttgtcaacatgattctccaattggatggtgaattgctgatgggctttgctaactttatgagcggcatagcccacgatggtaacggtacttctgtttttgatacagctattaaattaggttttgataaatcaactattaatgctatttcatcaggtatgttgcttggtggatcagatttctctggtgttgtttttgagattatctatttagtttcatacgtaggacttgcggtctatattaaatacttctactttgtaagagcaattacttttactgttttaattggtattggacctgtatttgtatctttatggtcatttaattggggtaaaagccgtacttttgcttggcttaaggactttttggggactgtatttattcaaattattcatgctcttacaatcacttttatggcactcttcatgcagtggaacaatgggcgtttgactgatggagcggcctcaagtatcgctcaagcaatcaactggcaaaaagaaaatccaggcaaacaatttttaaatactattacgttagggctagccaaccaacatggtagtggtactccatctaatatttcagtttttggcgttttagtagtaggattcattatcatgatcctgttccgcccattatctaaatcattagcagagctgtttggaattagcactaatatgctagataatattaatcattctacttcaaatgtcatgaaagcaggagcggctttaagtttgcctttagctttagctcctgctagagctggtttgtctactgcaaaaaatatcggtggtgcttttaaggatggtgtcaaaggtgcttctaaaggctctaagaatttcaaagactttagaaacaagcttggcaaaaatgtccgtcaaggttttcaaaggcgtaagcctgttcgatctggaattgcgaagatgaatggtgtcgttggaccaagcgcaggcgcattaattggtatggcggcaggtgcaggtgctggcgatccgcaaacaatgttggcattaagtgcttctggtggtgcaatcggcgaaagagcggctcgattagtcaataagccattatctacacttgggttaggtcagcttagaagagtaggtaaaacttttactaataaaccaaatttaaaagatactaataataaagtcaaaaatgctaataaaaagactaacggctccttagcagatcaaaataaagctgttcgtgacgcagaaaacggccgtacggctgtcgaccaaaaccttgctaatattgaagcaaagaaacaagatgttgagcaagaatttaaagaaggccgtattcctgttggaatgatgaatgacaagcttgcagatctaaataagcaagagcaacatttgaaaggcttgcaaagtgaccaagactttcaagatcgacttgccgttgcagacgctagaaaacaggctcaaggttcatacagtaatgctaccgatttagctaaagccactcaagaagcattaggtgatgaagcagataaggtttcagttggcaaaaatggtcaagccaatgatattcagcagtcattagctgtggcaggtgcttcaactaatggagcagtaatgtcacgttacgatggcaacgcaattgaaaaagcttcacagcaagctaaagctaaatatgccgaacttaatgcaggcaaattcgctgaaaatggtttttctgataagcagtcgtggatggattctagtcgttatcgtcaaggtgaagctaaagcaatggagctggctcgtaaagacgcagttattaattccgataacaaagtctttagtatgcccgatcaaactgataattcagcctttggtagcagtatggtaaatcgtgattcttacaagaacgagttatcacgtagaatgtctcaagcaggcgtatctaaagaagctcaaacaagagtcttgaatgcgattgatggtgtttcggggcaggccttagttactgaaactccaattacaggttcagatactccactacagactttgaattatggtttgaacaacaagcttgcaggtcagcgtgcatttacactgaacaacattggaaatcctgacccaactgctggtcaagtatctgcttatgatttagcacaagtatatcaaggtgataacagcatcgatgcaatgaatggtaatggtaatggcacagcctttactgctgatggtttccaaagctatctaaaaaatgctaaccatgccaatagaatgcaaaatattcaatctaatttggcggatgcttatgcagattaccaaaacacactatctgctactaaccaggcttttgaccaagcatcggctaatgccgtaggttttggtattccaaatcggcttttaggcatcagcaatttgggtagaaatgatagttttagtggtggtattcctggtggtgtaaatccttatgattacgttgcttcacaacgaattgccgactttaatagttcatttgggccatctgggatgaatccaggagacgctattcaagaattacgtgagaatgcttcatctgccagtggtagagaaggttctggtattgctccaggagacttgcgtttagttactggcaacactggttcacatattgaagctaaattagcagacggggattatcacttaattggtaattatggcggtggtgaccctagtctatctggagatcaacaaattattcagaacttagacgtaggtgcagatggtaccattggaccacgatatgatccaaatacacaccgtgtcgaaactccttatagtttattaggggatgtaagagtacctcgtgcttactctaatggaggacctaacttggatgatatgcttggcggttatagtagttctggtagcctagctaaatctgatgttactgacttcaatactatgccaccaagttatcaattagctcgtgcagaagcaaacggtcatccagtaactcttgataagttaaacaatgattactcagattacagatactactcagatggtagtcaagcagttattgttgggaaagataaagactctggtcaatttgaacaagttactgcaccattccaagatactatgcttgatacacatatgtctggtcagcaatactgtattcctctaactgatactggtaacggacttattcctgattcaacacaagaacctgatgttttttcaaagaataatgtcatttcacaacaggctagaaaagaaatcttggattctttgagattgcacatggataatagtgaaagtcgattagaattcaataattatcttaacgatcatttagcaccaacagagattaatcctcataactttattggaaatcactctgctaaccaagatttcacgcttcttgatttatctcactaaagagatggtttttatgaaaaagatacgtttatatcgtcaagatactaaattttccgttattttagcttggattaatcgacttgttacactttcttgttggattgctattgtcattgatattatttacttctctaaatctgttaatttagggatggcactagtttatggcatgtatacacccttaagatattttctttttgatatttcccctgagaagatacaaaagcgtcctccctcgcttgatagatctattcccttgactatctttgttagatatttagggaaagtttttccaattccacaaggcaatattttagcgactatcactggctttctacttgcttgtgctagagctatggttaatggctatggattgttgttctttgatacttttacctttatttatcaagttagggacaatacgacagataacccgttgacaccaagtgatgaagatagtagcagtaaattcaaaaaactagaaaagcaattgcttaaatcaaacaataaggggcaagaagaacgtttagatgagcttaaagaggaatggaaacaaacagaagttactaatagcttgaatgtttgggccttcccgctaagacggtatttgaaacgtccgacttactattttgacaatcatgaagttggtaatatttccattgatgatcagtatattttggaacccaaggaggataacgcaaagcaaaagcagagtaaaaactcttctactaaagagcaaaaagaagggatcgttaaactaaaaaagttattatagaaaaggcaacataccttgaataaaggtatgttgcctttttctatatctcttgggttgcaattagataggaagagtcatctacgtctttgaatttgatatggtcaacatgatttgtagcaaagacatgtcgaatagctttcataaagtcagaattgagtctaagatttttctggtaaacggagagtggtctctttttgtctatctttttgcttgttgtcaatacacggtagtatggaatatcaaagatacaatcatgctccttgcctaacttgctctttaacattaagcgatattcaaaatataaatctttttcgatgatttccatttgattggttaggacaggaagctcatcggcatcattaagatgttgttgatagaacgtattaatgatgtaagcataattttccaaaaattcttcagtaggatcatattccgttcctatttcatatttctttatcataattaaaaatctctctaaacatacttataactatattttgactttaaaactaaaataaaactagttgctcatatttcagttttaactaaatatgttacttattataaaagcaaattacttttgaaaccagtatttttagctattttaactattttttttttttgtatatttttaagtgctttaactatattactaattgatactttttttttaagacacctttcctgaaactgtcaaatcttttgtgtaaatagttctttctcgtaaattgattttttaattatttatttaatcaaagtaggattctaaggtgtcctgaacctgaccaaagcctttatgaattcgattgaaataacggtcattgtagctcattgcctgaataccaataaaagcatcaagcgactgttcagttggaaactctgccttaggcttagctttgcgcttgatcacattgttaaatgattcaatcatgttagtcgaataaattgaagctctgatctgcttgggatagttataaaagaccagcagatctggttctatgtctttcaagcttctgataacatggctgtaaaccttgccccatttggtatagaagtcatgcaggacagctgtggcttcttctttgtttgtctgttgatgcacctgtttgaattcgttcatgatcttttcacgatcgtcgacgcgtactttagcgcagatattgcgcatgacatgaaccaaacagcgttgaaaatgagctttaggataagtcctggccaaggctgttttcatgccaacaacaccatcagaaagaaagagttcaacttgcttcaagcctctggacttcatgttttgaagcatctctgtccagacttcaatgttctcactaggagcaatgcagtagtcaatgacttccttatgtccattaggtttaatgccaatggcaatatatactgcttcacgctcaaacgtttctcggcgcaaaggaaggtatgtcgcatccaaatagacgcagaaaaacttgtcgcttagcttgcgtttgtggtaagcctcaacctttggaatcatctgcttggaaatatttgatacctgagctggactgtaatggctgctatacatcttttcaattagatcggctatttccctggtggtcacgcccttggaataaagcttgataatcatgctttccaagacatccgagtgctgcttgtagtcaggcagcgtgtgctgatgaaattgaccgttgcgatcccgaggcacttgcacttcaattgggccaaattgcgtatcaactttgcggaaataagcaccatttctagagttgccagtattccagccatttctggcatagggatcatagcccagaaaggcagtcaattcagcttctagcaagttattaacagcctgttgtagctctttgcgcaataaatcatttattttgtctggattgaatagagcttgagcaaaatctttggtaaaatcattcatgaaggagttcttctttctgtatgtgttttttttgttcaaaccaatcatacgagaaaggaactcctttttctaatgtttaaagaaataaatttaaggaatcattcatccttacacaaactattttacagtctcagaaaacaagctttggatttttaaacataagcaaggtgattccgtatatttatataacaaaataattggcagggaaacgatagctaattactatgttgctaaaattagcaatgcaaataggtatattactcttgcactaaggattctcaatgtagcaggctatgatgccagacgaccatacatctttcatcgttggagcaagataattgttaggttgcctgagaaaggaaaaatagaaaatgtttaatttaacggttaattccgacttatcttctgcaggggaatttgaaaatacaatcctagttatattcttaggtataatgcttctttatttctttatctcagggattgtagtaacagtttcaaacaaaaaaattggtccgagaatgctacaagcaggtgtaataatcgtgtttggcggaatgctactagattttattgttatgaaccgaaaacaaactagtgcgctagatgactataacgttttagaaagttctttactacttgataaagttaataatgcaacaattgatgtcgaattaactagtgaccacaaatttattgttgagcaaaatgaaattaaaaatttaacaagtccagtacatggcaaaaaagtagtaacaactccagtaactactacaggtaaggcatatttgagagttgtcgattacattaaggataagcgaaagaaagagcctacagtaaatataaaaattactcctggtataagtaataccgtggcttcatatgagacaccaaagggcaaatttagggttatctgttatgctgataatcagagcaagcataaggataagaaatctactacagttctcaaatactagaaggtatgaggaaaaggtggcgaatatattgaggggagggatgcgaggaaaacttagaaaatcgtaaacattgtaaaagggctaatctaaatcagatagaaaggatagacccttaagtaatattaactttgcttttactgaaaataatagcagaaacccgtgattttaatcacggtgtagttcattttaagggaatttagcctacctaagctgattccctttcattaatttcttaaaaggacaacattatgcgagactacgaaaaagaatttaaagataaaattgcaaatttagttaaaataaaagaagaaaatggtaataaccaaggagctaaacttagctacaatgacctcattgtgcctaaatttgttacaatcattcaaaaatatgaaatgcgagctaacagacatgaacatcatattggtttaatcgtctctttgcttccagaatgggcgattagcttcaatcagatagaaaagcctgcacctggtatgaaaacaactgtcacgcttgaagaagaacaggagcaattcgacagctattatcaacaacatcctgataagacaaaacctgtagatatgtggaaagcacccttagctattcgttatgagtattttgataatgtatacaaccttaatactggaactatgaaagcaggacataagtttttaacttatcaagaagcggtagagatatttaccaaggatgaaaagtttcaagaatcagttaaagaccatgccgttgtagtaggtaagtactgtttgcaatatgtttacttgcaaaagcaagaagataaaactaaggcgcatccctactgggtctatcctaaacactataaagcaatcattgacaaagctacctatgataaattgaaaaaacatcaagcctttgtttgcaaaaccaaattacccaacagcgataataacgtagaaaagaccgctattaatttgtttgttaaacctgctactagatatgatgtggaacattttaaagaacttgacctagttaaaactacagaattagataaggatcagaaactagcagttaataattttaaatatcgggaatatattcaacgtaaacagaaatagcaagctaaagaaaaataaatgaagcgaagcgacgcggagcaatctgtgccgcttattttttccttttagaatcattttttcttgaatgaaagcgtaagtcagactgttcgcaaaaaaattctaagattattaaagaaagctaagtgtaaggctttgctgcacaaaagcctcacatatagagtataatagagtgtatcaggaggtaataaacatgactagaattcaagcaaatgtgaacaaagatgttgttgaccgtgttaattacatattaaaatctgttggtcaaacacctacaagtgtaattaattctctatatcatgctattgataacacgggagctattccttttaagatgggattaactctcgaacagcgcaactcattagaaattcaaagattagctctgaaacaaaagcctcaagtgattaaaaatgctaaagagtttgaagaaatctggcaggatgaagatgaagattaacgatgtttacacggcttatgtagcttggaataatggtggtaaaaatcgaccaattcttatattaaaagaagatgcagacaacgtttatttttatcgtattacaacaaagtataagaataagtcacgtgctatgaaagctattcgctatccaatagttgattggcaaaaagtaggtttgaataggaaatcttatgttgtaattgatagaccatatcaagtgaaaataagcttagcagagtttaattatgttggtcgattaacagttaatgacatagaaggcttaaagaacttcataactaattatcagaatcgtcaaaaaagtaaaagcaaacagtaattcaattaaagttgctttggaaaaataagaaatttaaagagtacaaaaaacgatcaagattttctttttaagaatcttgatcgtttttaatcatctggaaaggagttttctttcagatatatgatataattacatttaatattgaagtaattacttcaatagctaatgaacttagtgcaaaggtgctaggattcttgtattatcaagaatttggcacctttttttgatttaaaacgtttaagttattcatagttttagcggcaactacttgaattattactctaaagctatgacatacatctaagataatacgcaaggttgatgaagagatataaagaaatgacaaacatctaagattgtaatctactcaagaattatgtagtcggaggttcctaccataaaggaatgacatacatctaagatccgccgcttgatgcctttggtaaatatttcggttcctaccataaaggaatgacatacatctaagataggtattctttaatacttatcttagaatatatccagaaaccaattgctatcagaccttaaatgataattagattataacataactgttcgtaggatcgattttcaaaaaatacattttattatttctttgctttaaatggatatttcattgactgggggacaggggaaaatcattccggaaatcatttcatagcaaacatatgctaaattagacaaatcataatagttaagcttaatttctagttgagctagttccttatgtttttttaatcttttagataaattgaataagtaatctttcaataaggagttatattgttccttagaacataaggaatcccgccaagtaatatgatttagcaagctgtcaaccctgctagctactctataagctataagcttattggacaaatcactgtatgaattcaaaagataaatatttgataatactgcagaatttttaagcatatacagtttttctttggctaaagaaggattgcccaaagtcaatgcaagttcttttagcgtacacggttgttgggtctgatcctgaagaagttgaatcatagcagcataagctggaattctttctactattaaattagcataaaaagtattttttaccgcatttatctttacaggagagcctgtaatgcagggaatccaaaagaggctaggatcgttacatgtaacacgatattgtgctttaacatgtttagaatctactatcatttcgaccattttagtttggcctactctagcgtataagcggtcgccaaaaagaccattaactatctcagggatcttgtagtaacggaataaattattttcgctgctttgaaccattttacgtacctgtctttctaattatttaccttaattttattatgaaaatacgcgtggtgctagttaaatcgttctagacaataagccaaattataagctaaaattacaatttccaaccggctttgaaagcctatcagactacgtgctcgattgttctcggcattgtaataggtcagaagcgaaaagtcgctttcaattgttctgcgaatagccatcaattgatgatcattgtgctttttagctcctgtcatatttttacgatatggtgtccaaagttcataacccatttgttttagctgttgatgcagttctttgcctaaatagccttcgtcgccaagaagatagtaattagatggatgggcattttccagcagttcaactgtctccttggcatcatgaactgatgcttttgttacgacataatcaagaatgtaaccgtcatcgctaacaatggcatgaactttgaaaccatagaagtaaattttcttggtggccttataaccaatgttggcataaccgcgaaaaattttagcacgatagttgcgaattggttggcaaacaggtaccggaaagctgtcaatgatcaagaaatgtccattcaggtcaacctttttattcatttcttgccgtatctgataaatcaattgcaatagctgacgtgaacgccgattaaaacgtgagtgtgataaacaattgaaacattcacagaatcttctttgtgattcaattcctgtcttagcttgccagataagtaaagccaaaatcagactgtccgtagttttaatttgatcaatatttcgccgatgagtaaactcagccggtgcatacaaacgataccagtgccgacaaattatcactaaatctttaaaactaacttgtaaatggtggctaaaacgcttaagcttaaggcagttcaatcagatcaggctcttttctattattatacaagttgagtctaacaagattggacttttttattaactaaaacgatttaactagcaccacgcgtatgaaaataattactttcagaaaaatttagaagagcagaaaatcacaaacgtggaaatttctgcacatactaatgaaataaaagcagcatccctaagaaaatttatctctttaggacgctgttttcggctaacaatagtattacagtcattgtacagtcattgagggctagtactataaggaaatatcatacatctaagattcacttcccaactatatggttgatattattgattactaccgtaaagaaaagtcaaacatctaagatatattatccttttggtggaaatggttcattgattactacagtaaagaactaacatacatctaagatacggctattgggttaatcaatggattaaggagttattaccacagtgaaatgacatatatctaagatatgtaatctaaattatttttggctattactacaaagaaatgacatacatctaagattctcttagtatttttactccaagatcaaaagcatttaaggatcagataaggcttgatgaattagcaagatggatcattacttatcattcgtactccacagtctccgaaaagaatttggtcgctcttgatggtaagaaaacaaagttccaaaaatcagcaggctggttatatcgtcttagtccttgctttgtaacaggaaagaatctgttcgaaacattaatgctaaacacggtattagtaggggataaaggtgccgagcctcaaaagccatactgggaatataatcagcaagattatatcgaacatcgtctgcagatgaaacaaccgaaaaatacagcagaagcctatacagtttggtcaagaatgctacacattgacttggacgcatacggcaagcctattctttatagtgcaagtttcccacaactagaaactaaagaagcttatagcgaacagatgactacttggcggtttaatcaaaagcaaggtgggatgacacctgaccttaaacgtgaagccaatattgaagaaccgatgtggttagattggaatgaatttacagatgaaaatactgataacacgcatgctttaggaataatggaatggctaaagcttatttatcagcaagattggattagcaaaaatgccacagtaaatttaactacaattaatttaattgataatggtaatgtaacctccaagttaccgataagagaactatatggccgtatatcgcctaagttgtggatgctatcagatgagagctggtttaagacaattggcttaatagttgatgctacagctaaggtagctggatcagcgtggaaacttgctcaagaagtaagcaatcttaaagggctacaagcacaaagtaatgctattgcacaaaaaacaaaaaacaaattttggcgagaccttgctgattcgatgattagttttgacgactggctagaagaaatagagtatagtgacgatagagtagaggtagcacgaaattggtttaatattacagctaagacctatgatagtataagagcagagatttgtagcgatccatctccaagagaaatcaaaggagataatgaccagaacatatttacaataaataatcattatagaggtagcgtacaaagaacaatagttaatgctctgactgaaattaaaaagatttcctaaaaattatccaatttaaaatttgaagtagcatccctttagtagttatcgaaatgggatgcctttttgtgtgattgatataaaactgaaaaatagcgaatggaacgtaagaaaaacccacaaatgcaggtaacaacatttgtgggtttattactttgccgtagcaaaaatccaataggatttaagcttctaatatttcatcaataattgttttacatcgatcaatacagctgtttgttcctattgcataaaagttacttttttgatgaaataatgccgtccacgatatgtctctttcgtcaccaaaatatcgtcttgtgcattaggactagagttgattgacgtaatcctattcagactcataagtgtctcctttcctaatcttctaccttagaaaactcgccgttggctaaagccttatttacttcttctttagtcattgctgtaactaacgcatttccatcagaatcttgtgcaattgtattatcatcattcattttataataagcagttaagccctgtgataataaaaatgacggaaaacacatttcagcaatatttttcggtactttttttaaaaacattagaatcgcctcataatcatagcgtttgcaattaaaaggatatatcccagtaaaaccaatacaacagaaaaagtgatattacctaaaaatgcaaaaattagagttagtacaaaagaaagcatccctaaaatagcggtaagccaaaatgacagtacatagaacttgtaatcattcattagctttaacaactttattttcattttgtcacctcatgattttttctaactatcgatattataacaattttcaacatgcctttttggttttgtcaatgtaaattagtaggtattgctgagctttaggttaattcttgaactaggggttacagcattgggagcaaaaacataatcaaaaatttggttgtgagtgggatgctgaatattttgtagttgaactgggttgagataaggcaaattttgaattaatgggagagaatatgctccttttggccaccgttctaaaacggtcctaaacaagtcgagcggaatttcattaagccgtaactgatcgataaatgattgcttattcatttgcaaggatagtttatgcaattctgcatatgacctagtatgactgttgattgcccatttaaggggatgcacaaactcactaccgtagtcgggatgtttcttaagagctgatttatttacagcaccaaactgaaagtaattgtagatgtctcgatcgtattgcaacgtgagccaacgtaattcctgatgaagttgaacgttatttcctaatccgcactgtggttgcaataggacaggaatggttggtctccaagtgggtagccaattataaagttctttatattgattaagcgtgattgccgtgactggacgctcacgagtagggtagacgactaggggcggacactggtcgtctttttgttctgctaaataaatctgctcataagtttgaatgattgtatctaagctatgctcatcacctgcgataacaggctggataaatttagttaaagcgagcttgttatcaaaaattagcttacctaagaacggtgtttttgttctggaacgtgtatattgccaaataccattgccttgtgatcctttaataggctggtcaagatcgttgatcgaagtagacgctaacctaggattattaattaaagttttaaattcctcagaggggataaattggacttcccattgagacacttcattcagttgcttagtgtattgttgaatagagtttaagtaatctaaggtatagttactgccaagaataaattgcgctgtatcaatttgtgcttctgacacgccagtcagtacaatttttaaattagtagcttgcaaatacatctcgtaaagataatgcttttccccattatcatcagctaaaaatgacttcaaaaaccgactgctaaggctacttaatttgcgccctaaattgccatattgtttaaccttattagttggtaaagagccatcagtaatagccataactaacaaaatatcacgttgaggatgatctaatgcatagctaatgtagttaaggattttctgaatttgcgtgttgttggcttcggttcgattatccaattccacaaagatttcttgtctgcgtccgtggcgctcaaaactgatcgtttcatctgctacgaacgtatattgctgatatttatattgatttttaaaactcgatgtatcgaaaagcgttgggtcgaaattccgattgtttattaaattaatatttctgagtagattatcgaaatctgcagaggggtatcgaaatgttaaactcgatcgattgttcgataagctctgggaccaaagttttaaatttagcactccagctcgaaaggcactcgaaaggctttctgatttgtcagggattgaaacctcagcaatgagcgaatcactgtaaaaagcgtaatggaagccaacgtccatatttgtgcaattatgtacattcatgtacatccctgtacggccaccttcataaagtttgctatccctagagggagtatggtccttatcactttgaaattgaccttgctgtgaagaactatcacggtctatgtctttttctgtattattatgtctatctatgtacatccccgtacaaccaccttcataaaactcactatccttagaaggagtaaggcttttatcattttgagattgaccttgctgtgaagaattatcacagtctatgtctttctttgtattattatgtacatctatgtacatccctgtagtgttagtgctattagaaccgctatctttagagagagtaaggctttctttgcttttgataggggctttttgtgaatgcttatcttcatctatgtttatgtctgtattattatgtacatctatgtacatccctgtagtgttaggcttattagtggctttatgcttagagctagtaagactattactattaaaggatggcgtattaattaatggttttagcctaatatgtgatttattggtatcattcttcttttccgcttgggcctgcatccctgataaaagctgatctaatgcttcctgagcttttgtaacattgctacttggctgtttagccttactatcatgtgatttaactgcatccctagtactattagaagatttatcagaatccttaaaatcagagaaatctgattcagaataccaatcagaaataataggtttgctcgaactcttagaaccagaagcattaatcagatcagtcgcaagcccagcgtccttaaaaccgcctttggcaacatcattagctttacgatcatcactattaatggaaacagttatgttagattgaatagcagagttctgcttactgatagtattaccattaccgctgtcattagcagactgtaatgtgttaaaggacttattaccgtatatgggatataagttaattctttgtaaggatgcagaactaatatagccatctaacacagaatcaaatagtgtcttgcttactataggaatattagaagataaaggtaagtctttgtagtcattcaaactctgacagtgtttttttatccaactggtaatagcagaagatgttgccgccactccttttctggttgtcttttctgaatgcattatctggtttgctaaaatctggttgttcttatctgagtgcttatgaacgctgaatgtcccatcagaatgcatttgaatctggatttgcttatctggtttggtgttctggcttaattcaatttggctgtcctgttcgggatgcatatatttaattggcttatctggttgccctaaagacacaaagaaaagagaagaagctatagcaggagtagcaatcccataagacaaagacttaaaggcagatgcataaagactttgtactactacctcaatagcctgctcattatgggaattaacagcaaccaagggatccgtacctagagcaattccttgttgagacaggaaggtacggcaagcttttgttgggatataaatagaacgtggaacagcagaagctgtagtagctttggattttggtcgtttaagaagtaatccagaatactgacaccatttagataaaattgtacgtggaaacagaacaggataaccttgaacaacggaatagagcatagataattgactagaattaacaaagccaagatcacaaatcttatgtaaaagaacaagatcatttgttgttaaagacaatgagcctttaaaacgtttgggactaaaaataaacatataaatacctcctaaactagacatttaaatagtataagagtagcacttaggttttgtaattcgttaaaaactccaaaaacactgaaatcaaagggcttgagggatgcagaaagtcgacaaatatgctcttacttggacataggttttgtaattattttttgtaattcatttagggaggaaaatatggaagatttagaggaaaatcagacaaaaaaaagaagactagctgaggggctatttaaagcaacccattatcgaagctatcattcttatagacgttctctaaaagtaggaaaatcattcttagtgattggtattatctttgcattgacaagtttgattccgattttgctgttacaaacgttagctttgaatattgcagtaatttgtttgacagtttatctattaacagattattgggttgcgtctaaaagccaaatgatgaaaaaagaatccgaacaggtaataaccagcatttttgagtatgctaatttaaatgaaaagataaatggttggaatctttttacgggaatttatggatcagattcattggaactaacatttactaatgaaaaaagctttttaggagatgtcctacgattaattagaggagaagagtcaactttacccctaaatgaaaataatattgaagcgattaagtattttcttgaacgtcaaaatgaacaacaaggatttattgtgtatgcaactatgacagaaatgatggcagagaatttcacgagaagaggaattgtagttaaacaaattgaaaacaaatatcgtagtttgccgagcaggtgggattatgctgttgcaactggcagattagctaatgctttatggggttatccaagagattttggtgcttacattctgcgctatagtaaagaaaagggaaattttgaaaaataaatattaaaaatttccgactttttctgaaatgacaatttgtgattgctaaacttaaaagtgaagatcgaagaaaagaaggagttactactatgattattactttttatacaaaagatggagcttttaccacagataaatttaaaagcaccgaagacgctaaggaatatttggaagaacgaatttatccgattatgattcaagatattcaaagctcaggtcaagacagggcagtgatttatattcctaatgctaatgtctcaattcatgcgataaaggaacatggcaatccacaaaaaaatggacgtaatcttaagcttgtcaaaaaagacaagaatgaaaacaagaaagtgattaagtataatcttgaagatccagagttggagtcaatcatgctagatgataatgatcctaataaacaagatttcaatttaaaaatgttcgaaaaaatgagtgcaacacctcagcaaatgaaacagatggctcaagaaagtaatcggagagaagttcaaaacatggtgtatcgttattttttacgtcacttgtctgtattatacaatgatccagaatggcaagagtttcgactaaaatatgaccaagaaaaaaatggtaaaattttttagtttctaaataatctgcttacatgctataattaacttgtaaatcattattgaaatttttattttttcagacagctttaaaaagttgtaacagcgtcacatttgacgtattaggtggtttatttagttttattgcttccattgaagcagtagtatgtcttaagtaggtcttgatttatcttttgataagtcatgcgtaaaaaatttaaactgataagtaataaaggagcattgaacaatttcaatgttcctttttgatatgaaaaataggattaatgcgagttaattgtcggcatgttgatgagtaagcaaatgtagaaaggagtgattattgataagttagttatcattaataatttgttgttgaagttaataagtaattgaggagagcaatctaagatgattggtctctttttgttttttaagaggtatttaaaatgtttgatttctggaagtatgtagttgatttgttcaccaaccctatttttgatagtggattgatgtccttgtttatttggcgattaactaaggtttttccacgcttcttcaaggaatttttctaaatccgagtgacgtagctaaataaatcatatgagagattaacttaaagttagtctctttttattttaaatgaggtattaaagatgaaagatagaaaaattaaggttgtgcttgttgatgttaaaaaaggtactgctgaaagtaaagtagttgctgactctttggaaacttactacaaacttttagattgtgaagcaatcgacattgctaagcgtacaatcgacggaaaagaacatgattttatcgtggatgataatggtttgtacaacaacaaactggttccttcggttattaatactgacggaaaagtacaattcgttggcaatgtaattatctgtaattgcgatttagaaggaattgagcagagtcttagctctgacgaagtaaaaaatattttaaatcgaacgattgaattgcatatgccacaatctgaacagcaagatgaggtaaatagcaagatggtaatcgttgattaataaatctgttgagaaaaaagaaagatgaaaggaataaaaaatgaagaatattaaattatttgcagtaaatatggaagatgctaatgtagccaagtctcttcaaggagctgaacaatcagtttatgagattgactcagaattgcttgaaagaagaaacgaaagctatacaagaaatggtttagcaagtactactttaattggtaacttagtagacgatcctactgctatgattgatcctttaactaagcataatcaacctaagcccaataatggtgatgttgattatattaatgacaaggattacatctactttgctcatttttgttatgaaacagaagtttattgggatccaaaaactaataaacgtcatgctaataacaattatgttggattgatttttgcaagtcgtggagctaagtatgcaatcagtcattactacaaaggcgatggtttattattgcatggttatcttagaagcattttgagagaaaatccaactgattcaacacgtaatcttaacgtacaatatctcgttgttacagatttctctgctaacccaggtacgcatttaagacgtgcgatcagagataagttttcaaagcaaaacactcccactgttaagacttataacagtccagaagatgtgcttaaagaccgttctttgtcaaaagaacagcaaaacaaattaattgcggaattggttagaagacaatattcaaaagaaagtcgtcctgaacaaactactaatgttgatagaacttctactaatgaagctgttaatgcagtgcagaaacgtgttgataatattgaatcacagagtattcctcaagatgtacctcttccaagtgataatgaagctcctaaaaatgaaacagctgatagcttaaatgaatttgaagtacctgatgatttaagtaatgcctttgatgcagaattttaaatttagttcgattttgttttattcaaaatcgagctttttttttgcctaaaaataagagtttgatttttggttaaatctagcgatcagtacaagatataaggtttgaacttaaaataattttatcaatagaagaatgagaaagtaggtaaaaatattgattactggacgcaagtttgatttagagactattcataaggaagaattggataatcttaacgcttattacgctggtaatgaccctatgttaagcgatagtattgcttactatgcaatcttgtttagacgatttctttgggagaatgctgacaatacatttttacgtaaggatgaaaaagttcagcaaaaaatcattgaaaaagagctggatgagtttcaaggagcaatgcagtattcatttaataagggacaccagacagcgtttttagttttattaattagtaccaaaagcactcaagaatatgacactgaatactttaaaaatccagattcccgaaacaattttttgtacacctttgataaaactatcaattcagatgtatttaccaacaatatcagtcgggatgctaatgatactttgattaattacactaggaataattttgaaaatggttataacgaggtcatgagtttagccagaatcttctttaaaaagggagcttcagttgcttttgaccaagtgaggaaaagtatcgttggtgttgattatcagttgactggatatagtcggatgatgcaagtgccttataaccaagagtttacagttactcctgcttttaaagggaaattttgtattgaaacgcctggttttgaagaatgggatgtattttgggatgcaagttatgatgctaagtttgcaagtaatcttgtagcaaagatcttaattcattcgattactgctaagcaaataaaggaatacgctaagtttaaagcgtctacctatgaaatgcttttaaatcataatttagttgatggatttgctgatgatgatgctctatttgttgtggaaatcaatttcgctctttttaatcctaaagatactgtacgattattagatcaagctgaatatcaagcagtaagggtatctttagcatcaacaattgctcgtaagttaaacgtagacggcaagcatatatttatcaccgattaagttattgcacgtgaaagggggtgcagtaagtgagcaatacagtcttattaggaatggacgatgcaactgctgatatttttaagcaacaattagccaattactctcaaagcctagagatacttgataaaaatgtgccaatatttcataacgcacaaagggcgcttgaaatgctaaaaccaatgcctgacatattgttaatatcaacgaatcatataaggcttgattcgtctgactatcaaaaggaattattgagtggaattgctgatttgaaaatgaacaatacgacaagtagtgtgcgtattgctgtacaggcggatttaccaccctctgatccttttttaagaaaattagctttagtgcaagtaactgatattttttcaggaacggactccaatccatcagctttaagcatggctaaagttgcgaagcaactatcagttccgccaaatttaaaaaatgtttatcagtttgtatcaggtaatgaaccagtagaacaattatcagctattaatgatatgacagaagctatggcaacttcctcggttggcgaaaatgactctagggtcaaacaactagaaaaattagtcaaagtcttaaaggaacaaagggatgatttatccgttaaaagtggtgagcaatatgttccaagagaagattatgacgaaatcctaaagcagttaaaaacaattatggcttctggattaactgatgataaattcaaaaatttgtttcaaaagttgcttgatattgaagataagcaaaaacgtaagattagtaaattaaatcaaattaacgagaagttaaataattcgctagtcgatatgaacagtaggattgaaaatagctcaaatgaatctaggactatagcagaaaacaaaagactgaaaaatgaaatcaaacgtctgaggcaaaagcctgcaatgcaaccacaaaatagagtgatacataagtcagtacaagtaactaatcgtggcgcaccgaagtctcaatcaacatcatatagtcctactctaaataaagcactgcgtatcttaatgatttgggttgctttgatggctgtcatttttggaggtatatatggaattcataaaatccaaaataatcagcagacagcacaagagccttctaagccaaaatattccagtttaattaagagcggcaactatgatgaagccgctaagtattacccaaaaaaagctgttgatgccgaaaatgcaatgatggcggataaagatctttctgctaaagggacaatggctgagcgtatcagcaaatattccgatagtgatgtaatcaagtttgatgttgattattttaaggatgactatcaaggagcagtagatatttataaaaattcacctgatccagaattgactcagcttaccgatgcacggaaggttatggttgcctattctcttatgaaaataggatctattgcagaagctaagaaagtagcgggaactttgaataacgaaaatctcaataagagaattgaaatttattctaagttttacaatgcaaataaaattctaagcaacaagattacaaatggtcatttatccaagagtcaaataaaaaaagcaaaacagcaaataaaagaaaatcaagaagctatggataagctttaagttaaggagtaaaaagtatgaagcctttaaatcgtgaagaagttttacataaagagggaaatggcacaccaagcaataagagtgtcattcataagccatcaaagaaagctaaagaagaaatctttggtggagggaagccaacaatttatggcaagaaaaagtctcctcgtaaagttaagaaagataagaaaaacaagaaaaaagttgctggcttacctttaggggcaaaaattggtgctggtgttgctggtgttgctgtggttggaggtagtgtagccgcacttgtacataatataggggaaactaaaaatgatgtgcaaaatgctaatcgacacagcaaggatactggcttagactttggaacagataaagatgataatgataagtcagatcttgaaagccataaatcatccagaaagaaaaatgatgctaaacataataagcacgaaaaaaaatctaagggtgaagatgcattagacgatttgcttggtggtgatagtaattcatctagtgacgactctagtagtaagtcaagtaaatctaaacactctgacgatagtgatgacacaattgaatcattgattaatggcatgagtggcggtaacagcagtagtgataaaagcttgaaagcattagcagaaaaagcaactaagagtgtaagtcaagccaataagttaggtggcaaagaggccagcaaagctgtcaaaggtaaatctgaaccaagtaagttaccaaatgctaaagaaaatcaagatgaaaagacgaataagaatggcttaacagctttagcttataagccaggtcaaaagcaagacgaccaacttgatgccaaaataaatgatcttgttgctcgtactaatactcagagagaaaataatggtaagggaagagtcaccgaaaatgtaaataatggtggtaataaaggtaatactggtactgcaacagctagaccaaataataatggaaatactggaagttcaaaaccaactaatactggaaaaccaagtaatccattacataataatccaggtgacgtagtggttaagcctgataacccaggacatcagaccaatccagataacccaagtcatgagactaaaccaaataacccaggacatcaaactaacccagataacccaagtcatgagactaaaccaaataacccaggacatcaaactaatccagataatccaggacatcagactaatccagataatccaggacatcaaactaatccagataacccaacaactccaacatatccttatcaatcagtaccagatgggacaagtaagacagtaacatttgtcgatgtcagtggtaagaaaattggcactggtactcttactaagaatggcaataatgtaagtctgagcgacattcctagtgggtataaattagcagacgaagatactgaaggacattcagcccaattattgcaatggcctgatactatcaatgtggtaagtgatggtaccaatcaaccatctaccccgacttacccgtttcaaaatgtggcagatggaactactaaaggagttacatttgtcgatgcagatggcaagcaagttggtactggcacgttgaccaaaaatggtaataatgtaagtgtggatggaattccaggcggatataaactttcagatttggataccgaagggcattcagcccaattattgcaatggcctgatactattagtgtggtaagtgatggtaccagtcaaccgtctaagccagataatccaacttatccagctcaaaatattccagatggtacaagcaaacaagtacagtttgtaacatctgatgggactgttattggtactggcactttaagcaaagctggaaattcggttcagatttcagatattccaggcggatataaactttcagatttagatgctgacggacattcggctcaattactgcaatggcctaatagcattactgtggtaagtgatgaatcatcagtgcaaccaggcggtagtactaattcagatcaaccatccactccaacttatccgttccaaagcgtacccgatggaacaagtaaaacagtagcctttgttgatggaagtggcaatcaagtcggtactggtactcttactaagaatggcaacagtgtacatcttagtggtataccaggtgggtataaattaagcgatgaagattcacaaggtcattctgcgcaactatatcaatggcctaatagtattactgtagttagtgatggatcatcagtgcaaccaagcggcaatactaatccagatcaatcatctaatccaacttatccagctcaaagtattccagatggcacaagcaaacaagtacagtttgtaacatctgacgggactgttgttggtactggtacgttgactaaaagaaatggtggagttgcagttgatggaattccaggtggctatcaaatgactgatttagattcacaaggtcattcaatgcaactttggaattggcccgataagctcactgtcatgtctgtaaattcactagatgtagctaaatatattcatgcttaattagaaataaaaacaagggtgttagcaataaactaacgcctttattttttaagaggaagaggaaatgacaacagtaatacttgctgaaaaacccgaccaagcaagatcctatatgaatggtctcgggttaaagcacacggagaaacaacataaagcaagaggaaagaccttcctagatgatgatacaatcgtagtctcggccgcaggacatttattagagctttgtgaaccagaacactatggtgaagaatacaaagaccgagataatttgaatgcactacccataattccatcgcaatttgattacaatttgccaaaagaaaacgtatttctttataacgaaattaaaaatgcagtagcaaaagcagatagggtaattgtaagtacggatatggataatgaaggtggagctattgcttttaatatcttgcgttttagtggaatgcttaagcaaaagaagattctaagatcttatcccaccgctttaaataaacaggcagtagtacgacaattcaaaaatctaaaaccaatagataaaacatggagagatgcacatgcggcgatagctagatcaagagccgattggatgatcggaatgaacttaagtcgtttgtacacttcaaagttaaaaaacattggtattattggtaattttgctgtaggtagagccatttcaacaacattaaatttaatttgccaatggcagaaatcgattgatgattttgaggtgcaaccgatttatgagttagatggtagtactcttattaatggagcaaatgttgaacttaaatcaactattagagaagtaggacgtgagaacaaagaaaaattcatcgaggaaattaaaaagcatggtttatctaagaaaaaagcttatggtacggttgctttaattgattctaatgtcaaggaaacctatccacctattatgatgactaagggggacttatataaagaaatgaatcgagtggctggatggacacaagctaaatctaaaaaagtcatgcagaaaaattatgatgatggttaccaaacgtatcccagaacagatgcaggagaaattcctctgtacgagtatcaatatcttagagataaatttaatgattttatgcaaataatccatgaagatggtaagtatgaaagatatgacatgccagaaaacaaggcaaagaaatatcttgtcaaagaggggtcagatgatgctcactatggaattgttccaactgaaaagttgatggataatacaagagaagtaactgacgatcagagattaatgtatgaagtagtagtaagacgcgctatgacaatgtttattaagccatatcagtatgtatctaaccgcttaggagtatcggttagcggtatacctatgattgctcaaaataacgcaatgctcagcaagggctggaaagctatcttactaccaaataaaaggaaaaaaagagacacaaaaaaagctcaggatcctcaacaaggtatggattacgctaaatacttaaaaaaaggagatagactagttgtagatttaaagattaatgttgaaaaaactaaaccacctaagccactaaaatctattcaaatttatgataaaggtggaatgatggaacgagcatataaatatgttgaaaatcaaaaatatgcttcaattttgcgtaaaacgaaaggaattggaacttctgccacaagggatcaagccatggcaagtcttgttgctaaaaaatatattgcagtagacactaaggatgttattacggtaacacctaatggttggctaattaactggttattatgtggctcggaagttaatgatccagtacttacagctaaatgggaggaagaatatcaaaggattgataaagggcaaacaagtgcttcaaacttaattaattctacggcacaaatgatttataacgaatttgatcgaattgaaaagacttggaatacgcaaaaaactgttaattattatcaaagtaaagcaggggcttttaataaaaaggtgtctttaggtaaatgccctgtttgtggttctgatgtggtttttcgcaaggatcaaaagaatgcaggcaagtgggataattatgcttgcacaaataaagactgtaagtttattatctggcgacattactctaatcgtttagtaagtgaagcagatgttaaaaaattattggttggtcaaccaacacatgaatttaaaaatttgttaagtaagaagggtacagcttataatgcaaagttgattttaaaaccagatagtgaagcaggtacttataaacttaagccatacattaaaccagaccctgatcgcagatatgatagctaaaaaagcaggatagttgaaaccaatgtcattaagttaagacattgacaattaatattagacttttaaagcactgatttaacatttaattggttaaattggtgcttttttcgtacaacaaataaggcatagcacagattctgcttttttaagctacgcgatataaataatatacagctgatttgggcttaatatttctcttgtccttgcggcctggtctaattggaatggtataatagctgatctgaataaggatccgttcaaaatcttgcgttaaagaagaagccaaatacatgctctgaataatcaagcatgattgcttgaaattgatggcatattgatacttgcaatgcttttgcggaatataggcctgtgcatcaatttgactgattgcattaaacataatcatatgggcataaatttccatttcaataaatttatcttgtttggaatggaactgtacactgcctaaagaatacttcaatttcttgaaggaggtctcaataccccaacgcagatgataaagctctttaattctttttagcggataattttttcgatcaagattggttagcacaacttcccattcttctttgcctgatttggcatcattaattctaaatttgcaggctcgaaattttattgtgcataactcgccaaaatcccagcttagatcctgggtatttttagagcgatacttaatatattggcgataatgatgctggacatggtgaatattctcactggctttatgcgtgatgtagtaatagttagaagtagttaccaggcaggaaatctcacgatcacattcttgatcaggcaatgtcgttatttctttaactccgccttgtccagccttagttcgtattatgtaatgacagttaggcaggcgattgcagttttcaatcatattgaaactagtgtagccacgatccattgttacaatatatggaccacaattcaaagctttaagcatttgaacagccgctttgcgttcatccatttctgatttaggctgaaaaatacaatcctggtaggtattattcaatagatcatataaggcattaacgtgaatttgacaatagggtttctttttatgagaagaagcttgtacaatgttattcgatttcggattccagatttgattaaagtcagagccatcaatggcaaacaaacggtagtgatgatcaaaaagttgaatattaaatagattttgattaaaaacagtcagaatatgtttaaaacaagcaggagaaagctggcttttgcgttgaacataggcagaagtactaactactttatcgttctttttagttgcatcttcgccaaaagctctaaagagttcactgtttaaattctgaccttgcatgttaattgtagttttaaggactgtcgctgcatctaaagtgcgtttcctggtaaaagcatgaggattattaataaaatcgtgaatatgatccccagtattattgataatttgatcaagacgttctagaatattcttatgaagggctttcataattaacaccatctttctggcaataattttgaaggtttaaaatatataatatataagataggcgaaaaggctggtcttttcgcctttattttatacaaaaaaagagatcgaatccaaatgattcgatctctaaaaaagcacccttaattgtcaatgtcttaacttaatgacattgagttgaaactatcttgctttttgctgtgtgtcgggcatggcatttgtctagtctagtgaaagtctagatcacgggtagttgtcgccaagtgtagcgaaccacaagccgttagcggtgacgctatgggtgaaggaagtggctagcgagttttccgagcctacgtacagaaacctggtcaggccaaatggtggatgagactgcagcacaagttaaagtccaaaggacaaccgtaaaaccaagacggtaaaccagggggcagtggaaaattaaagatgaatgtcttaccccgagagatctcgtggacaggtgaaaccgagtaagctttaatatcagcgatcgtaagcctggtcgaaaaaggttaatcgcgagaagtcagctgaggtcgtagtagtgctgaaggttttgtaatgaaactggagcgaagggcctaatgtttgtaagagcatatctcgctataagcaatgttcagacagtccggataagaggatagcctagcacaaagagaacgtaactctttgatggtgaaagcaattgggacaattctgaataaatttacaagtagaaatggagatatcacgagatggaactaattgaacagattttaagtcaaaataatctcaaggaagcaatcaggagagtcaaaatcaataagggagcgcctggtgtagacaggagaacagttgatgagcttgatagctattttaaaaagcatcaagtagaaataaaggacgccatcatgaagatgaagtatcgtccgcaagctgttcgcagagtctacattcctaaagctaatggtaagaaacgtcctttaggaatacccacggttgttgaccgagtaatccagcaggctattgcccaagtattaatgaagatctatgatcctcattttagtgagcatagctatggctttagacctggacgcagtgctcatgacgctattgaacaagtcttggaatatttaaacgaaggctatcaatgggttgttgacctggatattgagaaatactttgacacggtaaatcatgataaattaatttcaataattagagagcaagtaaatgacaaaaccaccctccatttaattcgagcctttcttaaagctggagtaatggaagatggttgggttaagcctaataaactaggtgtaccacaaggcggccctctttcaccaattctatccaatatctatttagataaaatggataaagaattggaacaaagaggcctgcgctttgtccgctatgccgatgactgcaatatctttgtcaaaagcggtaaatcagccaaacgtgtgatgaattcaatttcatcatggctagaaagaaagctattcctaaaggtcaacgcaaccaaaaccaaagttgtacgaccaaccaagagcaactttcttggctttaccttctggaaaagtggcgaatactggcaagcaaagccaggagatgaccgcaaaatcaagctttatgacaagatgagagaacttctctgtcgcagaaaagcagctgctcagcctctatcactagtctttactaagataaatcaagtagttagaggctgggtcaattactttagagttggcgacatgaaatattttctaattaagttcagtcaatggctgcgtcataaagtacgggtggtaatcattaaacaatggaaactaccaaaacgaatatacattaacttaatgcggattaacaaggcactaaagtgcaattttagtgatgaagatattcataaagtagctaatacgcgcttaggttggtataaaagaagtacgggtcatgtcattaactttctgcttagcccaaaagtattgggcataagcaaagcggatcgcccaggcttggtcgatccgctagaatattatttatctcgtaaataatcacaaacgtagcgccggatacggaaccgtacgtccggtgcaatgagaggggcgagttataaaactccctctactctattataagaaattaaattgtaataactaacgcacatcttatagtatgctagccttttgcttgatagcttaagcctagtcattaaatattgatctgttaagttagaatttgaaacataagataagatgtaactttgtcgaagctttgaaatactcaaatctaatgggagtatatctctatctaatctaacagcacgcatgaatgactcattagtagcgatggggccgtctccattttgcttttgaaaaataaagggattgggagttttggtgaaattcaagtttttaacaatgtatgcctttaatccgctattatgaatgtgttcagcaatctcaagccaccgcactttcaataattcttttggtgtgtaaccgagtgaaattaataaaagtaatttgatggtttcgggatgcaatcctaagttaagcatattgggtaaatcattcatccaattaattacgacagtagtcctacgttgatatgatatgccttttaagccaactaggggatatgagtcaatcagatgggcttgtgttaaaaacgtgaagtatttgcgaatgtaagagatatatttattgatcgtgcgagtttttaaatgctcgtgaacatcaagttgtgtaagataatcatttacatctgaaactttaatgtttttaatatcaatatctccaacagcattagcaacatgataattccaaaaattaaataacacggaatttatcatatcaatagataactgattgagtttgtttacatgtgtacaccaaacgtcaaaagatgcttgatacggaaataagtctttttgattcataaaaaatagttgtaaaatccgaaaatatgtttattattaaataataagatgaggggataaaatgtctcaaatagtatgccttacgggtcaaattgcgcaaaaggggaaactttataaatctgaaaaaggaatactttaccttcgtattatactacacgaaagtagtggtaaaagtgttaacgaattccctattgttttttatcgtgaaacagcaaaagacgtggctcaaaattttgctaaagatgatttcgttttggtagaaggaaagattgtatctagtgaaaacagaaaatacgatcgtaccttctacaatttatcaatttttggcaaagaaatatcaaaattaagcgaatctaacgatcagaagggagatgctaaatcagcaccaacgaagcaagttgatgcatcagatctgagagatacaataaaaaacaagattgaagaacagtcttcaaaggaaccaaaagtagtaaagcctagatccgaaacttctgtggctacagaaaatctaggcggagaagtaaaacaatcaaaaagtaaacagatgttcgatgccgatagtcagatggcagagggaacatcagacaatagtggatttgacgaatcgttgtttgatttacctgacgacgacttttgatctttaatggggtagaatatgacagaaactagaacaattggtgaacttgctgacactttaggacttgattatgtgaaattaagaacgccatttaaacggttacaacaaacaaacttgtacctggtaattggtagtgatggaggagcaactcctaagaacaaatatctgagacaaattacaaatattaataaatattttgcaaaggctagtcttgtagatgacgaaatctttaatttcgtaaaagatcaatttgagtattaccaaaatgaaatcacaaatgtagaaagcgtttgtaaaagatcctacttaaacgaagaagatttatcaaaattcataaaaaattttgatcgaaatgaacaaaatgattttattgcaagaaatatgttttcgaaaaatcaatcggatgctttaattagaacaagaattgatgatttgatttcattgtatttgaagaaaaaaatatctgaaactaaagataccactgcggtagtgccatcttttgatgctaagacaaaattaactaaagataaaattataacagtacatttgcttgaaggaattcgtactcggacttggaagcaaggcgtggttgttggattttacttttcaaaaaaagcagggtgcgaattgccaatagtagcgctgtataatcaaaatatcgaattggatgatgcggttaaattagatcctaagtcaagaggaaacttccactttgcaaaacgaaagttaggtaataagcaaccagtagtatggaccataccaatcaacgatctgattgactattcagttacagatcgtcgaaagaaaaaagaagcggaaaagaaaaatgtcgattcgcattatttttattttctcaatatgctcctttctactttaagtaaatatcaaatcggatgcgaatttttaacacacggaaattaccgccatccttttatccaaatcatcacagatcctgttatttttcatctaaatgactttattgtaagcaaagatgatgtaaagaaagtagctgagataaagcttaaaacttttggtaagcctaatgtagaagagttagaaaagacatgtcgacattttactcaaaaattaggaacaaattttagagtggtcaaaaataaaaatgaattgataattcaatctgacttacgtaaagtttgggtcggttggtttgataaggaatctgagcctgtactcaaggggcttcaagagtattcagtaaagagtggcattccaatggacttattggctggaaaaatactacaggatttctattcaatatatattgagccaagcttacatgaggaagcaactacggttgctgaccaatttaaattgtacttcaaggaaaatggggaaaaataggaaatcaattaagaaggaaggccatgtgcttttctttttttatattaaaaaaagtattgaaaatgatacttaaaagtattgaaaataatactaaggcgagtataatgttaagtgtaagagataaggagttgaacatgagagaaatcgaaaaagctagagcaatacttttgtcgagtcatttaacgtttaatcaattacatgaaataactaaaatacctgtaccaacacttaagcgttatagtagacaagctaaagacaaagcatcttttggaaagtatgaaaatattgctaaattagctaaggtatatgacaaatcaaagtttgaagaccaaaaaagacaaatagatcttactaaggctatggaattaggagaatggctaaaaaataatatccctaatgatacatggggtaaaagaattaagaaagctattatgaatgattcagaagttttaataaagatattgcaaacaaatgaaaaataaaaagacacgaaaggaacgaaagaaatggtaaaccaagtagaaaatgaagaaataagagaagatagaagattggatagatggattgttaatttagccgactttttacaggaggaaaagtatcagttacttaaactccaagccttgcaacaagataagcctaaaacagattggaattttagggcaattaacaaaaagataaatgaagcaattgatgaacaactatatcatgtatatcaagtaagctttaataaagatgttttagctaaacatggtttaacacataaaagagaagattttgaagcagtcatgtatattgatcccgcattactaacgatgtttcaaactgtagacgatcattatattgaatgttacactttttagaaaatttagcgatcaacaaataaaaaataaaatgcgtacaatatccttaaatagatgattaagcatatttaaggagaaaatatggaaaagtatttaatgattggtcgtagcgcaatgccaactgtacaggatgcaggtagagaattggtagaaagacttaacaataccaatgaattattaatggtttctaacataatctttatgatggacagtcgtacacatgaaggtagaacatatcgtatacctgcaattacgcaagatgtcaatataacttttgatgggatggattacaaactaacttatgagaaagaacatatggcacttattagtgtatttgtttatatcctagacgtaattagagagtttaataaaaaagcagaaacaaataagaaattggcttttattaatcctaacgatgaaacacttaaagtgttggacgatattcttagtcaaaaccgaatctaaaaaaagagttgtaaggttgatgaaccaatgtcattaagttaagacattgacaattaagggtgcttttttagagatcgaatcatttggattcgatctctttttttgtataaaataaaggcgaaaagaccagccttttcgcctatcttatatattatatattttaaaccttcaaaattattgccagaaagatggtgttaattatgaaagcccttcataagaatattctagaacgtcttgatcaaattatcaataatactggggatcatattcacgattttattaataatcctcatgcttttaccaggaaacgcactttagatgcagcgacagtccttaaaactacaattaacatgcaaggtcagaatttaaacagtgaactctttagagcttttggcgaagatgcaactaaaaagaacgataaagtagttagtacttctgcctatgttcaacgcaaaagccagctttctcctgcttgttttaaacatattctgactgtttttaatcaaaatctatttaatattcaactttttgatcatcactaccgtttgtttgccattgatggctctgactttaatcaaatctggaatccgaaatcgaataacattgtacaagcttcttctcataaaaagaaaccctattgtcaaattcacgttaatgccttatatgatctattgaataatacctaccaggattgtatttttcagcctaaatcagaaatggatgaacgcaaagcggctgttcaaatgcttaaagctttgaattgtggtccatatattgtaacaatggatcgtggctacactagtttcaatatgattgaaaactgcaatcgcctgcctaactgtcattacataatacgaactaaggctggacaaggcggagttaaagaaataacgacattgcctgatcaagaatgtgatcgtgagatttcctgcctggtaactacttctaactattactacatcacgcataaagccagtgagaatattcaccatgtccagcatcattatcgccaatatattaagtatcgctctaaaaatacccaggatctaagctgggattttggcgagttatgcacaataaaatttcgagcctgcaaatttagaattaatgatgccaaatcaggcaaagaagaatgggaagttgtgctaaccaatcttgatcgaaaaaattatccgctaaaaagaattaaagagctttatcatctgcgttggggtattgagacctccttcaagaaattgaagtattctttaggcagtgtacagttccattccaaacaagataaatttattgaaatggaaatttatgcccatatgattatgtttaatgcaatcagtcaaattgatgcacaggcctatattccgcaaaagcattgcaagtatcaatatgccatcaatttcaagcaatcatgcttgattattcagagcatgtatttggcttcttctttaacgcaagattttgaacggatccttattcagatcagctattataccattccaattagaccaggccgcaaggacaagagaaatattaagcccaaatcagctgtatattatttatatcgcgtagcttaaaaaagcagaatctgtgctatgccttatttgttgtacgaaaaaagcaccaatttaaccaattaaatgttaaatcagtgctttaaaagtctaatattaattgtcaatgtcttaacttaatgacattggttgatgaacttacagctcttttttgttggatttatttaaatgcttatctaactactctgccgacaaaagaaggtttgaaataatcagatactgtttcaatatcaacgttctgtcctggttgtggtgcagctacaaatttgccattaccaatgtaaatagctacgtgatagctagcaccgtgagaaccccaaaatagaagatctcctggacgagcggtattgataacatcagacgcagaagcaacatcagttgtatctacattctgttcttgatgaattgtatcacgattaatttgaataccaacttgtcgataaatatattgcgtcaagccagaacaatcgaaaccgttaagcgattctccaccccattgataaggaattcccatattagcatattgaattgctaaattgacaatctgttctgctttggtatcgccaactaaagaagcttgatgaacgttggaattatcttgattctgggtagtggtttgcttgtcattttcttgtggttggtttggatcttgtagattaagttcatctccaatataaatctgagaatcattgaatgacaggttattccacttaagcacgtcttcggtttttaagccgtgttcataggcaatttcagagacggtatcacctgctttaacagtatatgtcttaggtggatcaggaatttctaaatcttgatcttctgatactttagcactggttttaagatgatttgcttttgctagagctttaacagttacatggtgttctttagcaatcgacttcaatgtttgacctttttctactttaactgtatcagcatgagctacggcaggtgctacaacagtagatgctagaccaccaccaataagtgcgaaagctagtcttactgagccacttgacttttgtgtgtattccactaaatttcagtcctttctttatcaatcaaattgttaaacatctttgcaaaaatgtgagattcgcaaattaaattcttcgtaccatccagaatctcgtagatgcgtacgtgcagtagtggcaactgatttttagcaagctcttgctcttcaaaagacattattaaatcagcatttttgaaaagaggaactatttgacttgaagaggatacttgaaagtaatcagcattattatctattgcatacttaagacgggggtttgcaaccttacgatagtttaaagataccgatttggctactaatagtagtacaaatggaaaattatactgatctacatccctgtactcaaaggctttttggttccgcaataaaaatgaataggtgagctttttagaaaagtaaaagcccgtgtaatacgtaagatctttacgtaatgaatcaaggttaacctgattaacatttaatgacttttgctttaaaggatctaaaacaaatgttgatggattatttttgtataagcaatgactaagtttagtctggtcaaatacagaaaagccaggaattagtttcttactatgaacgccataataggtaacttcatttgttttagcattaagcctaccgactaatctaatagggttatgacagtaaaagcaaactgcatagtagttgccattttgcaaatacggataggcagataaatacttacgaatatttttgctgtttagataatgccatttatctaagtggtgaattgtcgtaaaaaatatcataaaatacctacctttccatatccaaaattaattatgagacaaaacgatttaaaagagttgtttgttcaaaaatcagaaaaagggggattttttggaaaatagaaaaaaaaacaaaaaagataggaaaatttataggatatgaatgtcaagaaatgaattaggaggatcaacatgtcaaataccaaacaagatgaattgcaaaatggagtttttgttcttaaaaatgaccttttagattacgctaaaaagattgctaaggacgatgctgacagcacaactagtgtggtagaagtggtttataatgttttgcttcaaattggtaaccaagggaacaatacggaggagacgaaaaagttgcgtaaagcctttcaaggaattcctttagctatgcatacccaagctttgcggagctttattgtaagcttttattatgtaaatcacttagatcaagccttagtaccaagcaatcaagtgattaaaagcgtagtagcagaaatgatggcaaccacagaacatttttctgaaatagatggtcaaattctgtcaccttttgaagcaatttacttaactattgattcctttgtgcaggacaacgtacttaaagatcccaagcgtcatgaacaagcagatgtgttaatcggaaatattaaagcacaacgaagaatcttgaatgactatttaaaagaatatgatgcaaagtatggagcagaattgcgaaaggaagtatctgcggatgattaaactaaaaaaagcttggttaatagttctttcaactacgatagttttaattttagcaggctgttcaattaaaacaccattaacccagaaaaaattaacttctgaatttcagaaaaacactgttagcttaatgaatgtccatggttacgtgactgccaaagaacagcttaaagacaaaaaggctaaaaattttaataaatactataacaaaagtattcaaaaggaagaaaaatctgttcaaaagtctttagatgctttaaaaggtgcgaataactataaaggatactctagtagtgtttatcaatttagtaaaggagtattagcttacattaaagtggcacaaaaagatcagactgataaagctaatcaaaaagccacacaagctaaatatcatgcagttactaaagcggcagtcaaagttggtagcgcaagtgattccccaaaagtaaaagcatatgtaactacgatcgtgggctatgatcatcaaatgaaagctaagctagcacacgacaaaaaagtaaaagcagataaaaagaaaaaagctaatcgtccaattattgcttttagaggtacgggaaagcataaaggagaattggttgactataatggtaaacccatacctaagaaatatttgcaaaagaaaaagaaagcaaagcacactatcagtattaatccagtgttaggtacggctttgctcatggtttcgggcttattaatcattacggtgttcttgcaacctaataaatcagatgataatagttctgcattaatggatgattctaaacgtcctaaaccacgtggatatgaattattgatgtttcgtttaacagaattactaggagccattttagtaattttattaatcgtacttggtactactaaataggagggaatagatgcattacttaactagagtattcaagactttaaaaaaagtcacatgggaaaagataccaatatccctaaaacacatgatttatgtgcttttagtagtaattgggagttcccttgtttattggggtattgacgtgctgattactagtttgataggcaaactgtaaggagacaatatgggattaaaacaaattgtcgagaataacaaatttaaagtgcggaaacttgaaaagattgttaataaaattgaagctttagcagataagtattctgctatgagtgatgaagagcttcaatcacaaacttcaaagtttaaaaaagaattagctaacggaaaaacattagatgatttactggtagaagcttttgcaacaatcagagaagcggataaacgtgtgttaggactttatccttatccagtacagcttttaggcggtattgtcttacatcaaggaaacttggctgaaatgcgtactggtgaaggaaaaactttaactgaaactatgcctgtttacctaaatgctttaactggtaaaggtgtacatgtagttacagttaatgagtatctttcaagacgtgactttgaagaaatgggaccagtatttacctttatggggttgacagttggtcaaaatggtgaagaaatgatcttagaggataagaaagccgcatacaactgcgatattacttattcaactaatgatgcacttgcttttgactatttacgtgacaatatggtcaaatatcctgaagatcaagtacaaagaggtctaaattatgtaattgttgacgaagttgactctattttgattgacgaagcgagaactccattaattatttcaggtagtgacaagagctaccgtgctttatataagcaagccgatgcgattgccaaacggatgaataaaaatgattttacatatgatgctgagactaaaacaatcacacttgaaagatctggaattttaaaagccaatgaagctttcggtggtcaagatgtatatgatgaggattcctttatcttggctcactatttagatgaagccatgaaagctaattacacgatggaaaaagataaggattatatcgttaaagacggtgaagtacttattgtagatactaatactggtcgtgtgatgagtgagagaagattctctgatggcttacatcaagcactagaagctaaagaaggtgttgaaattcatgatgctaataaaacagaagcttctgtaacttaccaaaacttttttagaatgtataagaaattatcaggcatgtcggggaccgcttctactgaaagcgaggaattttatcaaacatttggtatggaagtagtaactgtcccaactaataagccgattgcacgtaaagatttacctgatgtactttatccaacagaaagagctaaattcagagcagtactcaagttgattgagaagatatatcaaactagagagccagttttggtcggaactgcttccgttgagaactcagaattgttatccaagatgttagatcaagctggcatccctcatgcagtgttgaatgctaaaaacaataagaaggaagcagaaattattgctcaagcaggtcaggcaggtgcagttacgattgcaactaacatggcaggacgtggtactgatattaagcttggaccaggagtaagggaattaggcggattatatgttttaggaactgaaaagcacgaatcaaggcgtattgataatcagttacgtggacgtgcaggtcgtcaaggagatcctggtaagacagttttttatatgtctttagaagatgatctaattaagagatttggtggcgagagaattgctaaaaccaaagataaacttgtggctgatggtgaagaatttattccaattaaaaattcacgtctgtttaacagtgctgtacgtcaatcacagaaaaaggttgagggaaacaactttgaccaacgtaaaaacaccttgcgctatgatgatgtaatgaatgaacaaagaattcacttatatagtcgcagacagactattttagactctaaagaggatcttacacctcacttaaaggcaatgcttaatcgtactgttgagcgcacggttgataaatacttcttggataaggaacacaccaattataaaggcttagtgaggtacgtaagagaatatctggatgtcgacttagatccaagccaaacagtgaacgaattgaatactacgattagagattctcgctacaaagaaaatttacaacgtagtattgacaagactaaccacctaggacgtttaaacttagaacaaatcaagagtttaaatcgagatgaattgaaggaatatttatttggagagacccttaaagatcttaaagataaagaggaagcattaattgatcctaatcaattacaagactttgaacgcacaatgatcttaaatgccatagatgccaattggaagaaccatattgatattatggagcaattaagacagtcagttacattacgaggttatggacagtacaatccattagttgagtatcagaacatggctcatgaaatgtataaccaaatgaccaataacattgaaaaagacgtttgtcgattcttcttacatacggagattagagagggagtacgttaaatatgagtatgagttctactaaaaaagaaaacagaaagaatttactaaaaagaattggaattacagttggaatcttattgatttatgacttactaacctacgttacaattccaggtgttgatcctcggcaattatcaaagattaccaataaccctgctttaaccatgatggcaatgttcagtggtggtggttttcaaactttttccttgatgtcgatgggactaagtgcttatatcagctcacaaattattgttcaactgatgcagtcaaatgttatcccgatcttgacggagtggagccaagagggagagattggacgaaaaaagctgactaaactcactcgttggttaactctaattcttggttttgtacaagggatcggaattgtggcaagcattaattccttatcgcaattcggatatgctgttgataacagttggtggacttacctagtaatcggaactttacttacagcaggtacctttcttgctatgtggtttggcgatcaaattacgcagtatggcctaggtaacgggatttcagtaatcattatggcaggtattgttaagcgtctaccagatatggctaagtcattctacttatcagtatcaactagtgcaggagttaaatgggacttagtagttattaccttagttttattggtagtattgactgcaattattatttggtttaaccgctcagagtatcgtttacctgttcaatatactcggactgctaatcgtttaactgataatacagtttccaaggatagttacttaccacttaaattaattgttcctggtgtggtcccagtaatttttgctagttcaattttaactattcctcaaacaattatgatgttcgtccaagcaaaaagtgattcggttgccgcaagaattgttaatgactttttctctctaaattcaccaagtggaactgtattatatggtattttgattgtcctctttacttatatttactcattggtacaggtagagcctaataagctggcagataatctttcaaaacaggatgcctatattcctggtgtatggcctggcgattcaacagcaatcttcgtcaaaaacttaatttatgacttagatttacctggttcagcattcttagccttgatctcagtagtaccattaattgcatcaagtttgatctcaccaagcttggaaatgggattaagtggctctagtttattaattatcgttggtgtactaactgatatgggacgacaaattgaaggcttgaaagttaaagaaggattttcagactttatgagtttaacttacagctttaagtaatcaacttaaactaaaagtatgaataataaatctaaatacatgaaaagggctttgttagtcatagtcattctgctgatggcttatcctttatttgtttttggacggtttaagtattgggaatggacaactactcctgaaatgcttagccagtctaaaacaatgacgatcttctatagagaaaagtgcagacgatgcaggaaggtaatgccatggcttatttttaagcacagtttagataaaaccagagtgaacgtagttaatgctaatcactatcagagatctagcttagaagagataggcgtatacattactcccgcttttagaattgacaatcagagctataacacgattgacgtttcaaaaattgaaagactttggaacagtagtaaatgaataagttactacaacattaaataaaaacaaaaagatgcatcccaatcaaagattgggatgcaagtaaacaaacaaggaagtaaaatctatggcaatttcagttgaaatctctcaaatgaacaacaataaatcaattattggcgtattttacaatggcagaccaacttattgggaagctcatgttgtaccaactaaggaaactgatcctaagacagggaaagagcaagtaagacttaacatcaaggctcaatcattaatcaggttgtggttagataaatatacagatgctacagatagcactacaatggctgatggcttgcatatgcttaaaaagttcttcggtgatgattataattcagcaatgcaaatttctgatatgactaaagacattgcaaaaaagatggcacagagaaaatttgaagaaactaaaagtaaattttctttataaaatggcaaaagtaacgaaagatacgcaataaattgcagataaaagcactatttttaaatagtgcttttattttgaaaaactattaatgataactaagtctggagtttttctgatttggtttctatattttgctatgcttaacatatcaagtttaatgcgtagggatgcacacaaatagaaattagaaggttaaaaaacccggatttaaaattgaagtgcaacactaagtgttaaacaaaaagaccatgaagacctaaacttgaagtgacgaaaaatcaagaaaggaagatcttcatgaccaattcaaattctagcatttctaagcactatcatcaattaaccagcgtacaacgtggacaaattcaagcaatgctggattccggcataacttcccgtactgttatcgctcaagaagttggctgccataagtcgacaatcagtcgcgaaatcaaacgcggaagcgtcctgcaaagagacagcagctatttattgtatgagcactattacgctgatactgcacagatttattatgagaagcgtcgcaaaaactgctatcagcgcaatccattgaagcattatgctgtctttttgagaatgctctccagacgctttaaagctaaatttgatgccaccagcatcgatgagttcgttggtgaattcaaaaggactatgccaggctacccttgtcccagcacaccaaccgtctatcgctatattgatcagggcttgctggacataagcaatattgatctgcctatgaagctcaaaagacgcaggaacaagcgtcatcacagccatggcggtcacgctttgcacaagaagcatcttggcaattccattgaacagcgtcctaaagagattgaagacagaaaagctccgctgcactgggaaggagatctggttaaaggcgtcagacgcaagaatcagcctgctttaatgactttgactgaaagaaccacacgctttgaagtagttatcaagattcctgactatcgggcaagcacatgccaaaggctgcttcaaaaggagattgacagacatcctgcctggtttaaatcaatcacgtttgacaatggctctgagtttgcggatatgaccaagatcaagggctgccagatttactttgctcacccatattctccatgggaaaggggcaccaatgagaactgcaatggtcttttgcgtcaattcttccctaagggcaagagcatgaaagacaagtcaaaagcttatgttcaacaggcaactgatgccattaaccacaaatatcgccgaatcctccaatatcacacagcagaggaactcttcaagcaatatatctcttcataacctaactgttgcacttaatttgacaattcaggaaggttaaaaaatgaaaaaaacaaaagatatttttggagaaattgtaccagaactcaaaaagcaaaaattcaacattgatattgacgaattcttagatttcattgggcattatgattttacttatttaatttctcccagtgaagtccaaggaaaattaaaaataagcattgttgatacttacaaacttttggaatttttagctcaacataaataccttgaaccagtgataccagtgtactgcccgtattgcaatgcatattctggttattactatgatactattggtgaaatacctaataaattgacttgcttatattgtaaacaagagatttctgatccattgcaaactgccgttattttctacaaaattccattaagaaaacaagacataaattactagaaaagaatttgtaatttgatagagacgaggtggtatataagcaccaaataaagtaaaaaaagagctatgctctttagcatagctctttaagattccgatatatcccggaacattacattgaaacttcaaactacttaaatagtaatttgttgctttatcttaaactacaaattagttgaaaaagatcaactaaggttgtatgtcatttctttatgtaataacccataaacagattctattacatagttggataaaatgcaataagtaagaaggaaaaatattatgaaaattaaaaactataatttggctttgacaccaagtacaagcgctgtaggacatgttgaagtagatgatgatcttaatattctggaaccagttcatcatcaaaaagctatcggggtagcaaaatttggcgaaggtgaaactgcagaggcaagaagattagctcgaagtgctagacgaaccactaaaagaagagcaaatcgaatcaatcattattttaatgaaattatgaagccagaaattgataaggtggatccgttaatgtttgaccgtatcaagcaagcaggattgtctccacttgacgaacgcaaggagtttagaactgtaatctttgatcgacctaacgttgctagctattatcacaagcaatttccaacaatttggcatttacaaaagtatttgatgattacagacgaaaaagctgatattagactaatttactgggccttacattctttgttaaaacatagaggtcatttctttaatactacgcctatgtcacagttcaagccaggaaagctaaatctcaaggacgacatgttggcattagatgactataatgacctagaaggactaagctttgcagttgctaattcgcctgaaattgaaaaggtcattaaagaccgttcaatgcgtaataaggaaaagattgcagaattaaagaaattaattgtaaatgatgtttctgataaagatttagcaaagcgtaataataagatcgtgagactgtaaaatagtttgtgtaaggatgaatgattccttaaatttatttctttaaacattagaaaaaggagttcctttctcgtatgattggtttgaacaaaaaaacacatacagaaagaagaactccttcatgaatgattttaccaaagattttgctcaagctctattcaatccagacaaaataaatgatttattgcgcaaagaactacaacaggctgttaataacttgctagaagctgaattgactgcctttctgggctatgatccctatgccagaaatggctggaatactggcaactctagaaatggtgcttatttccgcaaagttgatacgcaatttggcccaattgaagtgcaagtgcctcgggatcgcaacggtcaatttcatcagcacacgctgcctgactacaagcagcactcggatatcttggaaagcatgattatcaagctttactccaagggcgtgaccaccagggaaatagccgatctaattgaaaagatgtatggcagccattacagtccagctcaggtatcaaatatttccaagcagatgctccccaaggttgaggcttaccacaaacgcaagctaagcgacaagtttttctgcgtctatttggatgcgacataccttcctttgcgccgagaaacgtttgagcgtgaagcagtctatattgccattggcattaaacctaatggacataaggaagtcattgactactgcattgctcctagtgagaacattgaagtctggacagagatgcttcaaaacatgaagtccagaggcttgaagcaagttgaactctttctttctgatggtgttgttggcatgaaaacagccttggccaggacttatcctaaagctcattttcaacgctgtttggttcatgtcatgcgcaatatctgcgctaaagtacgcgtcgacgatcgtgaaaagatcatgaacgaattcaaacaggtgcatcaacagacaaacaaagaagaagccacagctgtcctgcatgacttctataccaaatggggcaaggtttacagccatgttatcagaagcttgaaagacatagaaccagatctgctggtcttttataactatcccaagcagatcagagcttcaatttattcgactaacatgattgaatcatttaacaatgtgatcaagcgcaaagctaagcctaaggcagagtttccaactgaacagtcgcttgatgcttttattggtattcaggcaatgagctacaatgaccgttatttcaatcgaattcataaaggctttggtcaggttcaggacaccttagaatcctactttgattaaataaataattaaaaaatcaatttacgagaaagaactatttacacaaaagatttgacagtttcaagatcgttactcaaattgttaatgcaatcatgggtaatagtttccacctaaactttatttttgatatagatctggataaattaactagtaaagcatggtcatttaaattagatgatccagaactagatacaaagtttgatgccattagtggtagtatgactgataaccaaattggaatttttgaaactctgcaaaaaatctattctgctatttcactgcttgatattttaaatgggagtagcagcgttgttgatgcaaaaattgcattatatgataagcataagagagatttaaacctttattttaagttcttgaatacattaccagatgaaatggcccagactcttaatgcaggctatacgttatacattggtaaccggggaaaagatctcttatctgctcgtaaattgttaaaagtcaatgtagctaaaaatttctcgcaagatgatttttacaaactcatcaacaaagaactgaagaacattgataaacaaggacttcaaactagatttagtgagaaggtaggtgaattggttgctcagaacaatttcttgcttgttcagcgctcaagcgataacgcttttatcccttatcagttgaatgcaattactttcaataagatcctcgaaaaccagggtaaatactatgacttcttagttaaacctaacccagcaaaaaaggatcgtaagaatgtgccttatgagttgagtcaattaatgcagtttactataccttattacgtaggacctctagttactccagaagagcaagttaaatctggaattcctaagacaagtcgttttgcttggatggttcgtaaggataatggagccattactccatggaatttttatgataaggtggatattgaagcaactgccgataagttcatcaagcgctctattgctaaagatagctatttattaagcgagttagtgttaccaaaacatagcttactatatgaaaagtacgaagtatttaatgaattgagcaacgttagtttagatggtaaaaaacttagtggcggtgttaagcaaattttatttaacgaagtatttaagaagaccaataaggttaacactagtcgtattctaaaagcattagctaagcacaatatacctggtagtaagatcacaggtttatctaacccagaagagttcacttcaagtctgcagacgtataacgcttggaaaaaatatttccctaaccaaattgataattttgcttatcaacaagacctagaaaaaatgatcgaatggtctacagtctttgaagatcataagatacttgctaaaaaattggatgaaatcgaatggcttgatgatgaccaaaagaaatttgtggcaaatactagattaagaggctgggggagattgtctaaaagactacttacaggacttaaggataactatggtaaaagtattatgcaacgacttgaaactactaaagctaatttccaacaaattgtctacaaaccagaatttcgtgaacagattgataaaattagccaagctgctgcaaagaaccaaagcttagaagatatccttgctaactcttatacctcaccaagtaatcgaaaagcaattagaaaaactatgagcgtggttgacgaatatatcaaacttaatcacggtaaagaacctgacaagatcttcctcatgttccaacgtagtgagcaggagaaaggaaaacaaactgaagctagaagcaaacagttaaaccgcatattgagtcagcttaaagctgataaatctgctaacaagttatttagcaagcaactagctgatgagttctctaatgctattaagaagagtaaatataagcttaatgataagcaatacttctatttccaacagctcggcagggatgcccttactggggaagtgatagattacgatgaactttacaaatacactgttcttcatataattccacgctctaagcttactgatgactcgcaaaataataaggtcttaactaagtacaaaattgttgacggttcggttgctttaaagtttggaaattcttactctgatgctttaggtatgccaattaaagcattttggactgaactcaataggttaaaattaattcctaaaggtaaactattaaacttaactactgattttagcactcttaataagtatcaaagagatggttacattgctcgtcagttagtagaaacccaacaaattgtaaaattgcttgctacaattatgcaaagtcgctttaagcatacaaaaattattgaagttcgtaatagtcaggtagccaacattaggtatcagttcgattatttcagaatcaaaaatttgaatgaatactatcgtggatttgatgcatatttggcggcagtagtagggacttatctttacaaagtctatccgaaagctcgcagactgtttgtttatggtcaatatctcaagcctaaaaaaacaaaccaagaaaatcaggatattcacttagattctgaaaagaaatctcagggctttaatttcttgtggaatttactttatggtaagcaagatcaaatatttgttaatggtacagatgtgatagcttttaatcgtaaagatctaattacaaaaatgaataccgtttataactacaagtcacaaaagatatcactggctattgattatcataatggagcgatgtttaaagcaacgttatttccaagaaacgatcgtgatactgccaaaactcgtaagcttattcccaagaaaaaagattacgataccgatatttatggtggctatacgtctaatgttgatggttatatgctgttagccgaaatcatcaagagagatggtaataagcaatatggtttttatggtgttccaagtagactagttagtgagttagatactctaaaaaagacgagatatactgaatatgaagaaaagctaaaggaaatcattaaaccagagcttggtgttgacctgaagaaaatcaaaaaaatcaagattttaaagaataaggttccgtttaatcaagtaattatcgacaagggcagtaaattctttattactagcactagctatcgttggaactatagacaattaatcttgtctgcagaatcacaacaaacattgatggacttgattgtagatccagatttttctaaccataaagcacgaaaagatgcacgaaaaaatgcagatgagcggctaattaaagtttacgaagaaatcctatatcaggtcaagaactatatgcctatgtttgttgagctgcatcgttgctatgagaaactggtagatgctcaaaagacctttaaatctctaaaaattagtgataaggcaattgtattaaatcaaattttgattttgttgcattctaatgcaacttcaccagtcttggaaaaattggggtatcatactagatttacattaggcaaaaagcataatttgatttctgagaatgcagttttagttacgcaatcaattactggactcaaagaaaatcatgtatcaattaagcagatgctataagcagaaaaataaatactaaaaaagagctaaattacttagtctaagattaagcaatttggctcttttatattgtcacaaaggacttacaatacatctaagataaggattaggtataagaatattagtgctagggttattaccataatgaaatgacatacatctaagatgaagtaactaaatataaagtaccatctttgggttattaccataaagaaatgtcatatatctaagatattatgaataagcaaattataagaattttaggttattaccataaagaaatgtcatatatctaagataggtattctttaatacttatcttagaatataacttaaaagccattgaacctgtcaaatcttttgtgtaaatagttctttctcgcaaattgattttttaattatttattcaaaataagattctaaggtatcctgaacctgaccaaagcctttatgaattcggttgaaatagcggtcattgtagctcattgcctggatgccaataaatgcatcaagcgactgttcagttggaaattctgccttaggcttagctttacgcttgatgacgttgttaaaggattcaatcatattggttgaataaattgaagctctgatttgtttgggataattgtagaagaccagcagatcgggctcaatttccttcaaacctttgatgacatggctataagctttattccatctggcatagaatttgtgcaagacagctgcagcttctttttggcttgtctgttgatgtatctgcttgaattcgttcatgatcttttcgcggtcatccacccggactttagcacagatattgcgcatgacatgaaccaggcagcgttgaaaatgagctttaggataagtcctggccaaggctgttttcatgccaacaacaccatcagaaagaaagagttcaacttgcttcaagcctctggacttcatgttttgaagcatctctgtccagacttcaatgttctcactaggagcaatgcagtagtcaatgacttccttatgtccattaggtttaatgccaatggcaatatatactgcttcacgctcaaacgtttctcggcgcaaaggaaggtatgtcgcatccaaatagacacagaaaaacttgtcgcttagcttgcgcttgtgataagcctcaaccttggggagcatctgcttggaaatatttgatacttgagctggactataatgactgccatacattttctcaatcaagtcagcgatttctctggtagttacgcctttggagtagagcttgataatcgtgctttccaaaacatcagagtgctgcttgtagtcaggcagcgtgtgctgatgaaactgaccgttgcggtctcgaggcacttgcacttcaattggtccaaactgggtatcaaccttgcggaaataagcaccatttctagaattgccagtattccagccatttctggcatagggatcatagcctatcaactcagcttctagcaagttattaacagcctgttgtagctctttgcgcaataaatcatttattttgtctggattgaatagagcttgagcaaaatctttggtaaaatcattcatgaaggagttcttctttctgtatgtgtttttttgttcaaaccaatcatacgagaaaggaactcctttttctaatgtttaaagaaataaatttaaggaatcattcatccttacacaaactattttacagtctccaaaaatgaggtaaaactatgaagtctaatcaaattagtgtaatcttagttcacacagcaccattcttagttgagtataagtcaattaagaatgatattgatacttttcagaaagaaatcaattgtaatttttttgatgttaagtcattcaccatcaatgataaaaaatatagcttttactacgatgaatcaggattgtacactaaaaaaacagttccttcattgattaacaaaaatggtgatattctgttagtcaataacttcttcatttgcaaggaaaagcaaacagaagaaggaaaaatagcttcaagcttaactgctgatgaagctaaggctatcatgtcatcacatttttacaatttaaatacaactgatggagttatcaaagtaatgatgatttaaagaagaaggctattgagaagggatcctcaatagcctttcttttgcttttaactatgtggtgtcttttccaaggaaagacaccaccttctttctttgaaaacgttgatatatcaaggagtaaaactgtattttaaaattgatggtgttaaaatataaataaagcataaaaagacaccataggtgttgaagcctgtggataacttctgaaaaagtactacataaatagtcaaaataaagtgtgctgagagagcaattctaaggccaagttcatataaacaaattgatgactaatcatataaggctgtagaatgttaatctctgaaagtgctaattttaaagcaaaaaggataaaaaatgagtaataaaactaaaattgtaaaaccaattaaagatgcgtgggttttaaaaagtgtgcaagattcgctaaaaaaagattttgatactggtatgagaaactttacaatttttcaagtaggtaaggcaacattgttaagagtaagtgatgttctgaaactaaaaaaatcagatgtctatgattatgatggtcaaatcaaacgaaatgcttatacgattgataagaaaacaaaaaaacacaatgtcttatacttaaaacctgttgtcaaagatttagaagattattatgtttggcttcaagaatggcaaagcaaacatccccaacaacaggtatttacaagtcagtggctttttccttcttttactagaccagaaaagcatattgatcgtaaacgttactatcggataatgtacaaagttggtcaaaaattaaacatcccttatttagggactcatactatgagaaagacaggtgcctttaaagtgtatgaacaaacaaaccacaatatcggtttggtgatgaagcttttaaatcattcatctgaagaagtaactttagcttatttaggtttagaccaagaaacacgtgaacatattcttgatacgatcaattttgattagaattgagcaaagaaaaaataaaggtgaaattttgctatgctctgattaacaagaaaggacgtagcaaagaaatgagaatactagatgttgcttgtggttccaagatgttttggtatcaaaaccatgaacctcatactacctacatggatataagagatattgaaaaagcgatcttagatcgaggtaaggaaagaaaaatcaaagtacatcctgatataattggcgattttagaaatattccctttgaagataatacctttgatttagttgtattcgaccctccgcacttaaaatatggtggatcaaactcatggcttgttattaagtacggtaagttagataaagaccattggcaggaagatctttcaagaggctttcatgaatgccttagagtgcttaagcctaatggcactctactttttaaatggaatgacgatcaaattaagttttcagaagtaattaaagcttttggacaactaccaattttcggtgacaaaagatctaaaaccaaatggtcagtatttattaaaactatataatgaggaaagaaggtgaatatttaatgatgagtgtggtcaatgtggcccaggatcctaaacaattatcatcaagaaaacgatcaccgcatgttaatgatatgaagttaattatgaaaattattacttttaaatcttcaggattttacactttaggattacgagcaaaaatcaagtttgaatattactttatggatgagctagatgaaatgtagagctaagtgaaaattctagtgaataaaggagttgcgtttttacgtagctcctttttttgcatagaaatagcatatttggagtaatagagaaaatcagaaataacaaaatgaataagctaaacttctaatcaaggatggaagaaaaagtatgaaaattaaaattgctgaaaattttgttattaaagtaccaagattcactgatgatttaaactacttgaaaaaactatataaattaaatttcggtatgtttaaatttgaaaatgaagactacaaaaatctgaacgaaaaaatcatcttatcagaaaatgataattgggaaaaagcgattggaattgcgattttaaatgttaagctgatttctaaacaaatatttactaaggtagccactgacgattatccttattacaaatacccatatataatgtttagctcaaaaatcacgtatgttgttgaagaattagcaactaagactattccaaagctaatcgaacaatacaaaagtgggaaagacgaagaagtatattcgtctacctatatatctaatgccgtaatatatagtatccgtctcatggacaatgaaaatttacgtggctcatttgctaaattagacaatttacctaaaatcgaggataaacgtagaacatggcagaattattacgatgaaaaaagacgctaccaaagactctatcataataaagagaattttgattatattaagcgtttaaattatgttaataagagaattaattattttcaaaatgtcaaaagggatgctaaagcagaaattgatttcttgaatgataaattgcaatatttgttagatttagagaataagctaacaaaaggcaacaaattcggtgatacaagctttttgtatgatattttgctcaatgaaagcaaaaatgaatttgaagatgctattaaaggttatgtcttccaggagtatattgaattagaatctcgagtaaaaaaagatataaaagaaatgcagagtgaagacaaattagctagtccacttgagaagtttgttgacgaaaagaaattactagaactaattatcaaaagtgccaaaagtatagaaagtcttgaccgtatttgtacttatatgtctgaccttgaaattttagatccaagaaatttaactcaagtaattgattctaatacttatttgattgaacatcctgtactgttagaagaatattgtgaccttagaaacgatataaatgctgttttaaatactctaaacgataacgaagagaacacgatacgattacgatatttgattcccagaacgaaaaatgaagataaaaataaaagaaattataagaaaaatgacggtactgtacgaacttatagagaaataggactaatctttggtctatcggctaaccgaataagagaacttttagctaaagggtttcgcaagttgtggcatccaacgagatctgatattatacgaccatatttgtccatgaatatagcagatgaaataaatgaggtaagggatgaacataacatattaccaatgaactggaaaaagtaaatatattgcattatggagctaaccctttgtaaacatgatattgatgctatcgtaaaaccataattgataaaaaatgaggttatattatggtagaaaaaatttttgaagttaaaacattttttccagtagatgctgacatggatggtaacgaaagaactaccactaaacgagtagtagaagtattagaagccagtcctgaagatgttgttaatttatataacagttatttagagggagattacaaggttagcattagttttatcccccctgccaagcaggaacaaaaagaaaatgcagatcatgccgatgataacagcaaagaagcagtgattacaccttttgatgtaggaaaagccctagacaagcaaggcataccttatcgtgccaccttaaagataaaagacaaaggcgactacgaagatatgattaaagttattcatttagttgaagcagatggctttaatttaaatgtttcagttactcttaaaatcaatgaagatagtctaattaatttagatgttccaggaacatggactgaaagagaaaatgcaatttttaaggttagtcctaaagcacataccaataaggtagaagaacttaagagtttgtatgaagcaattaatcgagctggttatgaagcaaaaattgatattactcctaaagcgccagaagctaataatatggatgatgataatgatacgtttgctaatcagctatctgcttatccatctcacactctagttaagttttcacttagaaacagtgctgattagaggtggatgaatgttaatcgaaagacgatggacgatgcctaataagaacacgttttctattaagccaattcatgatcttcttagcagtgaagtagagcaaaataaaatcgtagttgatcccttctcaaacggtgaaagggaatttggaagtttaactaatgatttgaatcctaatgtagattcagactatcataaagatgcattacagtttctgaaatcaattcctacggaaaatgcggatatcgtactatacgacccaccatactctactaggcaggtttcggaaagttatcataattttggctttgaagttactcaagcagatacgcaagcttcttggcgtagaaaacacttggacgagattgctcgaatattaaaacccaatggtaaatgtatttgctttgggtggaattcaaatggagtagggataaaaagagggtttaatctctatcgagttttgatagttgcacacggtggaagccacaatgatacattagttacctgcaaaattaaaataaatcaaaaataatcattattatgttaaattattgagccatagaaaatggctcttttttaatgcattttgaataaaaagggatgctgagagggcgattctaagatcaagttcataaaaaagactgataactaaactaataaagtgagttaaatattaggcaagttcaaaaatatcaaataaacagaaaatgctcaatcttgagtaaacaagaattacacgtctaaaaatgctaaagttttggtatacggaaaggaagtaaaaaatgaaaaagctaaataaaaaaaggcttcactctatgaaaataaaacagaaaaagaaaataaaacaagatttgataaatggcagtgattatcacaacacaagagaaaaattaaaatattttgacttactaaataaggaaatatttgctaaggacaaagtttggctttaccctaaatttttaacatcagatattcctaaaaagtacaaaacgattaatgaagcttgccaagaaaatgtagaacaagctatgtttgaatcaagaaattggcataagcatgatactcaaaatgaagcaagcaatagagatatactaaagccatttgttcaaaatcataaatcatttaaatggttggcagtagtatcagatattacatctccagatcctgaatcgcataatagttttattcttttagaccatattctattgcttagcgatgaaaagaaaatgagctggtgctactttacgcaatggagccatgatattgcaattgactatcatctttggctaccagtgaataatattaagtattttgaaaataaagactatcaagacattgctattggggatgctgttgtaggagagagctatgctaaacgatataggaccaagggaagaatacaatatggctttggcttaactaacatcttgcactgtggtgtcatgaaaatggatgcaactgttgctggtatacgtggtgctaccagcattaaccctagaattatctctgattatgatcgtggcgatttcttagtagcaaaactagtttattcagcagtctataaggcaagcctaaatcgttaccgtaaaaagacaattgataatcttaagcatattaatctgactattggcataaaaattattaattttgaaaaagaaaactatcattcacgcttcactgacggtgatttactagctgaaaaatttaaagaaaaatcagaacaattaagtcaaaatatagatgagaaccaaaccaatggcttgcttaacagagtttatcctgaaagcaaattacctgcttttcggataaaaatggatcacaaatttcaatttaataataaaaataaataaaaaaatgcatttcttaagtcaatgttattaagtgaaaatgcattctttatgcaataagaacaaacagttaggagaaagaacatagaataccgccccatctattgatgaggggatgaatttggtctttctcctgctttttttgttcattctctggacttttcctgaattagcctgttttttcctgctatccttaaattattaagtcatgtggtaataagtcaaatgaaaggcgatgatatttgttctttttgatcataaatttgagtatatgaaactaagccttggtaaaggttgattttttaaatgttaaacttttgtttacttttaaatttagaccaatttttgaaattaagacctcggtgtcctgtacagtttgtcatctttgagcaatttaaagataactcgtactaattttcttgcagttaatgtgcaagcacgtttatgcggcgagtagacagcttcatcatacttcttttggtaatattttttgaaaacaggatcatgtaatcttgctagattggcagcttcaatcaagtaatatcttagatatctgtttccagtcctggccattggagtatgttcgttgctgtgatctcccgattgatattgattccaggttaggccggcatacttagccagctgttcttctttatcaaagcgatcgatacttccgatctcagcgataataccagctgtataggttttgccaataccgggaattgattccagaattttgctttctggtaatgcatcaacgatacgatcaattgctttttctagatctttaatagattcattaaagctttgaatcatgttgtaatgaacagaaagcactgcatcaattgaatcagtcattactttgcctaagcgatatgaacctctaacagctttcttaattgctttagccaaggtatctggatcggaaaagcgtcctctgcctttaacctgtaagtaagaaattaagtcttcggtaggcatatccgcgatctcatccagagttttactatcggttacaatagacatcattgtagcaccgaaaagaggagtattaatcttatctttatcgacagtgattagtttattaacccgataatataaagcttcaatgaagtgctgtttggtacgagtcagttcttgaactaattcatatctggtacgcgttaaacgctctaaagcaagatagttgtcttgtctggcaatgcttactcgataatgtccaaagcttagatacaaagcaatgtaataagcatcgagaggatcagttttactttcttcaaagactttatgaaacctgctggtttctttggggttaattacatcagtctctacattgagcttttgtaaatcttcgtcattttggaaaaagtaagcaggatgaaaactgtaaatagatgtagcttccatgccaataatgatttgatcatagtgtttattttgagctagatctaaaatttgttttttcagttcactagcaccataaagatcattgacaaagctatcgttaattaagcgtttgttttgatcttctgaatcaagtgcaacgacctgtaaatctttagaactaacatcaataccgacaaataatttcattggaaatggcctcctttctttcaaatttctgatcatagattttgatcttcacatgttaacccctaattacagttcttaagttcaatctcgccagtataagtattcactggttgcttctttgaaagctgcacctaatcccaattgctcaaggactagcaaaaagaagcaatcaatacagcatgtgagttagagcataaaggaactgcctgggtggcagacttataaagcagacaaaactgcaggaggtgataacctagaccagttgaccaaagccaatgacaattagaggctaacatgcgaagatcaaaaagcaaatactaatttgattaattatcacaatatgactaattacaatttatataatacgaggaggtgaaactatggcttttaaaactaagctggccgtcagaaaatgggactgcccatattgccaagcgcatcatgatcgagacgtgaatgccgctaagaatatcttggctagggcaatcaactaataaagtaaaataaataaaatataggcttgggccaagccttgctaagaaaggccgaccgctatgctctggtgggaattaaaaagccacgaagctcaaataaattgagcgaacatttttgaatgaagagcagaagtcaggctgttcgcagaaaaactctaaacaaagagaccacccatctatttgatgggtggtaggtcatttgttactaatagcagtaatatatttatttagaccaccatattgtttaatgattctagcaatttcccagcgttttaatctgctttgatttacaagtgacttaatcgtaatggggcaattatcagaagcattaatgagctttatagtggcatcttctaagcaagcagagcgtacctgccactcccattcagctcgtgaagggattcctagttcttttcgataatcttctactttattccaatacagataaatggacgcaacagggactcctagccgctttagttctttccaagcaggcaaataattcatgttgctattttcaaatacttgtctggatttataaagtatttcttccttacttaccctagattgtgcggagcaaaaagtagctttaatacctgctatttcaagaactcctttccaatctcttttaaaacgatgaatagccgaagctgatcgtggataatcgacagagtggggaggatatcctagctcttgagcaagctgttgtatttccgtgatgtaaatatcatctgggatccatacattaccgtgggttggttgatctccaaaataaacgtagagtttctcaatactttgaaaattagttctaataaaatcgttttcggctttagtaaaatcaagactaactggtaagcggtgcttatttgctttgatgatatcatatttagataaaatataattcttatctaagatcttcttagtcataaaatgagactgtaaaatagtttgtgtaaggatgaatgattccttaaatttatttctttaaacattagaaaaaggagttcctttctcgtatgattggtttgaacaaaaaaaacacatacagaaagaagaactccttcatgaatgattttaccaaagattttgctcaagctctattcaatccagacaaaataaatgatttattgcgcaaagaactacaacaggctgttaataacttgctagaagctgaattgactgcctttctgggctatgatccctatgccagaaatggctggaatactggcaactctagaaatggtgcttatttccgcaaagttgatacgcaatttggcccaattgaagtgcaagtgcctcgggatcgcaacggtcaatttcatcagcacacgctgcctgactacaagcagcactcggatatcttggaaagcatgattatcaagctttactccaagggcgtgaccaccagggaaatagccgatctaattgaaaagatgtatggcagccattacagtccagctcaggtatcaaatatttccaagcagatgattccaaaggttgaggcttaccacaaacgcaagctaagcgacaagtttttctgcgtctatttggatgcgacataccttcctttgcgccgagaaacgtttgagcgtgaagcagtctatattgccattggcattaaacctaatggacataaggaagtcattgactactgcattgctcctagtgagaacattgaagtctggacagagatgcttcaaaacatgaagtccagaggcttgaagcaagttgaactctttctttctgatggtgttgttggcatgaaaacagccttggccaggacttatcctaaagctcattttcaacgctgtttggttcatgtcatgcgcaatatctgcgctaaagtacgcgtcgacgatcgtgaaaagatcatgaacgaattcaaacaggtgcatcaacagacaaacaaagaagaagccacagctgtcctgcatgacttctataccaaatggggcaaggtttacagccatgttatcagaagcttgaaagacatagaaccagatctgctggtcttttataactatcccaagcagatcagagcttcaatttattcgactaacatgattgaatcatttaacaatgtgatcaagcgcaaagctaagcctaaggcagagtttccaactgaacagtcgcttgatgcatttattggcatccaggcaatgagctacaatgaccgctatttcaaccgaattcataaaggctttggtcaggttcaggataccttagaatcctactttgattaaataaataattaaaaaatcaatttacgagaaagaactatttacacaaaagatttgacagtttccataaatcgtttcctccgatatttctatacaaagaatacaagaaaacgattaaatattgttgatatttcaaaaacagaagaaatgcttgctttaaattaagtatattgataacagtttaggtaaaatagagaaactgagaaatagcgttttaaaaggaatattattaagatatgcaaaaataatgaaaaaactaaacaataggagataaaaatggacttagaagatttattatctgtaattaaaaccgatgaaagtggttttacaaataagattgaagatatcaaggatcattacttggtaaaaattaaaatgaagaagtatatgtacggtaatcaaaacacattctacgcattattttcaaatgtagatgatgatgattctgcagatgatcttgtttatgccaatatgcacatgagcaaatattactttaatgcgcatgtacttggaagtaaagatgaaaatggcatttttaaaccactagtagaaagtgattttgaaggtgatgaatattctgctgatagaagtagtcaactttacgttagagattttgctatcaaaacggagtgcattgctcacattgaaattgtaacgtacggatgataagatatattttttaacaggcaggcacataatatagaagcaaaaaaataaaataaagagcctccatctatttgatggaggggtaggttatgaaaaaatgtaactagaatgctgacaagtaataaaaataaatcaaggaggatattaatggaagaggagaccaataataaagaagagcaatacgtatgtcctggtttgatttttaatacgcatgataaaagaataaatgacttttttgttaaaaaaagatggttcttatttgtgatttgcctatgctcaggtgttataagtggtatggctttaccagtcaatactcaatttcgtggcatagcattaataggtgtatggcttttagaaataccaagttggttaatttggtttactaccattggcagatttagacctgatttcttttggggacatttgaatcctaaattatgtatgatgcatcccatatcagaacttaaaaatcttgtacaagaacaacaaatacaagaagaaaaatttcaacagtctaataagcgagagaaaagcaaattggttactttattattccttcaaattgcaattgtgttgtggatgagtattgttcatcatgtggatttatatatgctgataggtgctgtggggttatcaggctacagtttattctacttatggcttcgtaacttgttttctagcgttgatattgaatggggcaaattctcgaaatcaaactaaatactaaaagaatatactaatctagtgttagaagtcattcgacggaatgactgtctagcgcttttatttttgctttaaaataaaagttaagatgaagcaataatgccgtaaggactttgggcacttgatgccgttacaaaagtggacagctttatcttaatgagaacattagatttttgaaaagggatgtttcaattatgtgaaattttctgttttttatttgattttaagttcttagataactagttatttatcttgtttactagctataaaaacaacaaaaaaaggcgcttagcgtcttttttttctgcccgtaagcttggtaaattttctttttttgagactagggtcattataagaaaatgtcatttcttatttctctaaaaaaccataatcataaatatagtctctgatattattttctaattgctgataggcaggtataaagatattagtgtatgtattaggtttagtaccattagtcataatccttctaatttgctcccagccagcatcccaacgagttaaacagaactcagggtaatcatcatttaacagttgcctaaagcgaaaggtatctttaacgactaactttgatgcattcaagacagacgttgctgaatcgcttaagtcgtcttgatgttcttgaagccaatggtaaacaaagcgttcatcatcttcatcaatgtcaaagcccatttgtgctaatcgattatcattagccaacttcttcataaaatctttgctaagccaaaagaattgatttttaatgtcatatgtttctcccaagtaatccacatctgaaagagaaacttgatagctataggtattaaacaaagaataaactacgcaatcggccataatctttcgatattcaggagagttaataagagcttcactaggcttgttataattgtctttatcgtttatccaagtatgctgagaagcctttctaatagcaaaattaatcatacatttttcaaagttatctatggttataggcaccccacgctctctactacaatctgcagaaaacaagccagtttcacgaggtccatattgcaccatatttcccttaaaccaagcatatcctaaagcatcattaggataataaatcttgggtcgtcttgtagataacttaaaagcagacgtaaatagaggtgtagccatatgaatatctttatctggatcatttctccacttttctttaacccaatcagctaagttatccttgggatcttgctcactcaaggtatggatatataaatcctttattccattgaaagtgctatcctttagcattaatggaaatttgttctgaataatgtttttagttttactagttttgcttactaaaactgtaaaacttattccccaatttttggccgtatcgctaaattcaccagaattaaataaaaaaccagatttaaaatcaaattttttaaatatagcttctttaagtccatgaaacttctttccaccagtcatatactgcgttttacagaaaaatgcaataaccacattagttaaactgaacgcttttactagcattaagatacgatagtagaattgagcgtataaattttcagaggaagcaccaatattcatatgtttattaacttcggtttcagccaatccgcctttacttccttttcccacggtgtttccagcagatgcataaggtggattcatataaaaaacgattggcctattgtttaataaagcttctactaacccaggagctaatttgtacaatttagatttagtataatttttaggacttatatttacatcatcgttcaaaaagtcatattgaaaagctacattatcacggttgaacatcttgcctagatttaactcgccatcgtaaagggtagaggagaataagttcttaaatttaaagtcacgtgtaaggttcttagaaccagcagatgcatcccatacgtaatatttatctttccaatcattgcctaatacatcactaattgcattaatggcctcattagcccagatggttggtgtccaatattcaccagagaatcttcttgcggtttcttctagcagtacatccccaacttccgtaatactttttatttcatcggaattatagttagtatcaaagcgtgagaagaaagcataccaattacgcccattcacacgatagtcttggtaagtaccattatcatgtttaagagtagccgtattgtttctgataaagaaagcatcatgattagtcagtgcattaataaacatagaaactaggtcctggtcagaagcaaccttagtctttttctgcgtaactaagcgtaagaattcatcataaactccacgaatattagcttgattaactggtattttggttaacttagtctcttcatcagcagatgctaaatcagcaactaacccaataacatcgttaagatcaaagtcttttgcggtaatatcatagacataaggattgatgttcttgtcattgtgcaaacgatcaaagagttcaacaggtttaagattgtcatacacttgtcttggactgagttctttccattgattgcctaagttcatatctaaatatgaccacagtacacgtgcattaatgacgaatacttggtttgcatcggcagccaagacaacattaggcatttctaggttaagcttattaccgtcagcaatgtgccattgaatgtgctttaaatagtaaatgacttgtcctagaatacgttcttgctgattacgatgatccattgctacatcagctttaaattctgtaattagatttaaggaaacagcaatgtttcttacgaatagtagaccatctgtctgtaataatttgtcgatatgagtactgtagccctcattgccttttacgtctgcaaaacagtagttaagaactgaataccattgcgcttgtacagcttcttcttgtttaacattagaagcactactgatactagcaatttcctttagcgcagataaaaaatccttctgtctagtctttggatattttcgccaagtcaagccaccattagtaatctcaaagcgagaattaatctttttagcacctaatttatcgatgtatttaacgtgttctttcatatagtcttttctctctatctatttttcttataagaaagatgcaatgttaggtaggagttatgcatccatcctttatgtaaaagtataacgcaagcttaatttgtttcgaaagtgcaacttttattcgtcttttcaattaagttaagctgaatgaattcgtaaaaacgaagtgctaattttgacagtttaagatatgtacgaaattagccctgtgctaaaatacacattagttacgcgtggtgctagttaaatcgttctagacaatatgccatattataagctaaaatagctatttctagccgttgttgaaaacctactaagctcctggctcgattattctcagcattgtaatagctaagcaaagaaaagtcgctttcgattgttcttctaattgccattaactgatgatcattatgctttttagcacccctcatgtttttacgatatggtgtccaaagcacgtatcccatacgctttagcttggctgctaagtcttttcctaaatagccttcatctcctaaaagataatggttaattggatgagcattgatcatcaattctaccgtctcttttgcatcatgtaccgacgccttagtaactgcgtagtcaagcagatagccatcatcactcactattgcgtggactttgaagccataatagtagatttttttcgtcgctttataaccaatatcggctatgccacggaagatcttaacgtgataattgcgaacaggctgacaaactggaatcggaaaactgtcgataatcaataattctccacctacctttacttcctgattccaaccctgacggatacaacgaattagaggcaagagcattcgagctcgacggttaaaacgagaatgagataagccaacgaagaatttacagaatcttcgttgagattcaattccaatttcagtttgccaaatgagcatcgctaagatagaactatcaggaagcttggtctgatcaacatttttacgatgtttaagtccatcaggcgcataaagcttatacagcgagcgacaaatcacatttaaccgattaaaactaacttgtaaatggtgagaaaaacgattaagcttgagatagttcaattagatcagactcttttctatttaaattacttacaacttgagtctagtctaattggacttttttattaactaaaacgatttaactagcaccacgcgtattagttataagaaattaacagatagagtaggaaagttttgtctttaaaagaataaggcatattatcatgaataatttaaaagagaataaagaagacagtgttgcagaacaatatgattttaaacaatcattgaataaattacttaaagcagctaatgaattggacaaaaacaaagcataattaaaagctacccgaaatgggtagcttttaattaatatactcttatttgattaaagttctcttttaataataaaaagttattactctaaaagatgacatacatctaagattactccacttaacaccacagatcttcatatggttaccatcttgaagaaatgacatacatctaagatccgtgggcgaccgcgctagcggactctggtggttaccaccttaaagaaatgacatacatctaagatagatattctttaatatctatcttagaatatgacttaaaagccgttgttattggatcttaaatgataattaaattatagcatagctgattaataagccaaataggataatttcgaaaaactcttcccatatttccattagttttactaaatagtgcatttgctaaaaatgggagagaggagcaatagctgacttggacccatcaaatagaaaagatagcggttgactctgatgtagagcataagtttgctagttaattggtaaagtagctaatgaattgaacaaagtctaggaataaaagatagatatctcagataatatatcctttaaagaacatcatattattttagttaaaaggccatttgtataatacaactctttaattaaagttcttcttttaacaaaagagtttacataataattattatggtataaacatgcagggcaatagaatttatgatagaagaaaacaaactatgctgatatactatttctaagcctaaatagattgcaattgcttgggctattgcaaccagcatgttttagatgctttgggtaaattagctattaacctagccaaagcttacgcaataacaaaaaaagccaatcacaaggattagctttactaccagttatctaaaactacgattgaagtcaacgaccgcaactcgcaactcgttggcttcttttcatatgcaattatagcatgaattagccatctaataaagatagtggactgtctcactgtctttttggtaaatttgaaaatacatttttaagaactacattaagaacatactcatcggtgaaaacaggcttttaaccattattaaagctatactttgttgcatatttgaactatcaagagttaattttccttgctttataatgtattcttcaatatggtcaggaattagcccacgacatttaatttcactctttgaatagcccaattgtttgagcatttcatcattttcctcaaatggactgaggacctttaacatgaagttatatcgcttaataccatatcttttaagcctctcaggatctgaacgatatttttgcttttaacgcccctttttgtttaatttataattctttcaataaaacagtaattttaataaaagagttataagccctctttttcttgaaaattgaacataaaaacaaagattatatgcttttgataaaatttacttaattactaatttcctcgaggaataaaaatgaaacataatttttttagattaatatttatatttttaggaataattagctcttttaatggactggtcatgtttttcattacagccatagagcttaaaactatttttctaaaattagctgttgtagggattgtgtttggaatgctatttttggctgaatctcttcatctttttaaaactgctaagacaataaaacatgcggagagtgcttttaccttatatcttgactttagcttctttcttttgttattaggatggctaaatcttattatgtctggtcttgctgtaaatttaggtataatatacaaaatattatcggttattggctattcatcaatcgttttatttctaatatgtattagtattgctccaatttattcatttataagtgtgttcaaaaacaaaaagttctaaaaaggtgttttttcaattttcagtttttcttttcaagagttttaatcagctggtctaaaattaacttcacacgagtaataagtttagttgtcaacatattttgcttacaaaaagcaattcctgcttaaagtgctgaatgtattatattaaacctactcctttctaaaatttcgtaaaatagcaccagaaataagtagtttctgtaataccttttgaaaattaattacaattccaatatacataggaataaacaggtcagaaaaagcttgtcgaatagttgcatcaggaatcaaattattagcaatccaatgtaaaataaaggtcattaaacaacattcaaataatcagataaaaaaagattgattatccccccataacaatgggtgataaatcaatcttttctttatttaaatattcttaattctcttcagagctactatgctctcgtctactcaagccctcagctaacattttttgtcttcttcagacaatacaggctttagttcttcaactttacctacccatttaagcaaaggctgtacgcctagatagctgtcttttttcttactattcatctttatttttacgtaatctaaagctaaatagtccagataaagtagcagcaactaagcccataatagacaagaagtccttgctttcaccagtttgtggcaatgttgaattagacattttttctaggtgtttacttatggctgttcttaacttggattctgattttgttgttacagttaacttttcgcctaacttcttatgatctgaatgcttttcctgtactgaaatcgtatgattcttcttattatcagtcttaacttcatgagattcagtgtctttagaagtgtcttcagatggttgctctggagtgctttcttgattaatattcttattagagtcatcatcagtaacatttttatctggatttacttccggaatcttttcaattactttaacaataagtggttcatcttttgccttgattgtcacttctttaggaagcttgtcatttgattcatacccactaggtatttctggcgttactttgaccttatcaccagtttttcctgttaccacttgttgaccgacttttttaccgttctcatcaacatagataatagtttgactaccttcatttgcaacatatgtaataactttgtctaaacctgaagtgctagatggcgtaactacaatacttggtacatcgctaatttctgtatatccagaaattgttggtacttctactttgtcaaaagtatgttgcccattctctgaccaatttccataagtaacttcacctgttacttcgtctacagtagcatctctagtaaaagttacggtttgcatggtgatcgtttttttaccagttggatcaataattgttacttttctagttattgtcttattaaggtcatcatgagctaacccatctggataatgcttatcctttgtacctggaattaaatcacctttattcactggtttatctggtgtgacatgactcttgccgtgttcaacagttacagtaattggagtgtcatccggcttgatagttactttgcttggaacctcacccttgagaacataaccatctggcacatcgggagtaactttaaccttttcatcagtcttaccagaaattacttgtttaccaatttcagaaccatcttcatcttggtagacgattgtttgagttccatcgttagcagtgtaagtaatgttgacagtttgatctttcgtcgtacctgttactgcttccttagcaacgtttgactgactagctgtatagcccggaattactggcacatcatagcttgtccattcactagttgtccaatctgggtgagcattttcttgcccagtgacttgctttgccagagtcgcagtttgcttaaccaatgtcgttttaccgtctggtgttgtgacgttaattgttcgggtgactgttttttcaacatatgggatatacatcccgcctactggaacgattgctttagcccgcaactgaccattttgttcgttaaagtcagatagctcgccgcctatgacatactctcgcagcgaacttaaatcaataggtttattggtcatttcaattgccgtagcagcacgatcacctgtggctttggccagagcatttgactcattccctactaatctgaatccagcaaagtccgaatctatattggacttattgacagacaaatacccatgccatgctcggttaacgtaatcaggatcatcagggtagtacttcaaaaaatgttccttaagcttttcaccccatgaaagatcggtaccgacaataataccattaactacctcggtaccattaggcatttggtaagtttgaccgcctaagtttaagctcgtccagtcgtccgcgaatgacacaactttattatctactaaatcgtaattaacgtgtcccgttaaagtaccaacaactcctaccgttgggtctactttttcaagattgtcgtcgtatgactttttaatttcatcgtctaattgcgtccattgattttgtgtaacaacaatacccggctcgctctcatcatcaacatcaaccaaagtcatgaatcctatttgaacatcgactgtagcttcacgttgtacaactttgtgtaccaagtgaagcgttacgtcaccactaccatttgtaaacgtataagtagttggcaattgctgaccgtcagccaattgatatttatcgggcacggttaagtttaggttaaccgtgtcaccggttttccctgtaatggttgtggtgtgtacaatcttcccgtcatcgtcaacgtagttgatatgagtagtttggctattggctgtgtagctaatgtcgatcgtttgattagtcgtatcgctagtaactttcgttgctggcacttcgttttggctcgctgtgtagcccggcacggttggtacatctactttatcaaaagtatgcttaccgccttctgaccaatcatcgtaagtcaccttgttagtaacttcatcaactgttgcacctcttgtgaaggttacagtttgagtagtagttgatttcttaccagttggatcagtaatggttacttctctagtaactgttttgttcaaatcatcatgacttacaccattaaagtgtacacttggattatctggcaaaactgttccattttcttttggattatcaggggtaaccttgatagttttgtgttcaatttgaacgactacatctgggtgtccttcagcattaaagctaatttgtgtaggtaattcttgtcctgaaactaattgccaaccttttggaaccgttactgatacattagctgtttctccagtcttccccgttacaggagtgtcttgaattgttttattatcattatcaactaacttaacatggctagtatgttcactagcaacataagttatatcaatagtttcattttgggtatctcctgttacagttttagctgatacagttggttgactggctgtataaccagctactacaggtgcgtcatactctgcccattctccaccagtccagttgccggtttcttgacttgctaatttatcatttctagcgtctggaagtgtgtatacagtaaaaacaggttgttttgcatcagctttttggctgacggtctttacttctccatttggtaagtgaatattaattgtacgttgtgctgagtgatgcttataagtatatggaacataattaaggaaaatttctcgaccactgtctatacctgttgctccgctatttagttcgctatccaacttgggtaacaaatctaaagttagtttttcaggattgatgtgatctaccgcatggtcaccttgcataacttcaggggaacttgtagttgtccaagtgaagttaggatctactttttcttgatattcttttaaattcagccaacttttgccgtcaaataccaatgaggttttttctgataaataataaccatcagcatgtagtccatcttttagccaagtttgagtgctgattacaccattatcatgtgcttcactaataagcttgtccaactcgttatactgctcttcatgctgctctttatactgctcgttatactgtgggtgatctgcataataaatactaccttcatttatatatgttttatccaaatcacccaaactattaatagcatctaaatcttttgcttccgtagcatcatcatcgtttccattaccctgataaatatgattataatcccaagttgcttctcctaagaagcgttccgtcaccaaatcatatttctgtgtacctttaataaatacttcctgacctgctatatactcataactatttggagatttacttaaacctgcacccaacagtccagataaagaaaaacttgcactttgtacaaatctttttgttacgtttatctgtttagttttgtgctttaaatgcacaacgattggatcaattgctttatttccaacagttatagtttcaggcaaattttgatttggaactaaaatataattttcaagttttttaactatcttgtatattagtatttacaatttgcccttcttttactgttgatgtatcagtcttccaaatcaaattaccattttcatcatcatctacataggtaattgagaatgtttgagaatttcttttgtagacagctactgttttttcactatctggggtttgataaatagtttgcccatcattttcgtctaaatcaaaattttgtataaatccagaggattccaattcatagtctttaggtacaggaatatcattataatcaaaatatattgaaaatcggtgacttggtttattagttatagtactagttttaattcccaaatcgttaatactatcaacattcaattttgcccctgtttgagagattttaattccttcagaagtatattttccatcctttggagtaaaagtaatggttaatactgtgtcatctgcaaactttttaccagctagatcatcttcagccttatgaagtgctttattatttggagcgtctttgtctgcataaacccaatgaaatgtatcgtgccaagtaactttcttttccttttgttcattcgtatctacattagatgactccttaggctttacttcaatatctttagaatcaggagctcttgaattgttttcgtcgtttaaattagtaggtttggcaacagctttcgttgtatcacttttatcattatttaagttgttttctttaactttaattgaagaatcttgagatgtttgtaattgagttttttcaaaagttggcgcaactgcactggaatcttctgatttgctctgatctgaggtatttactaccgcttgtttattggtattatcgacagtaacattactagttgctggattattagcgctatttgtttctacaatttttagactagtatcagtgttttcagctgctttaacttcattagagtagcttaaaaaggcaacagtcccaatcacacaactgactgcaccaatagatagttttcgaatactaaatcgttgtaatctttccatttcttatacttcctttttgaataaataagctatttttaaatttaaatagaagtatagcattgaggtgaacttttactttttatcactatatttgcgtgaaaatactaccttttgtcttttttatttttacgaaattttgagactgtaaaatattttgtgtaaggatgaataattccttaaatttatttcttaaaacattagaaaaaggagttcctttctcgtatgattggtttgaacaaaaaaacacatacagaaagaagaactccttcatgaatgattttacaaaaaatatagcacaagctctattcaatcaagacaaaataaacgatttattgcgcaaagagctacaacaggctgttaataacttgctagaagctgaattgactgcctttctgggctatgatccctatgccagaaatggctggaatactggcaattctagaaatggtgcttatttccgcaaggttgatacccagtttggaccaattgaagtgcaagtgcctcgagatcgcaacggccagtttcatcagcacacgctgcctgactacaagcagcactctgatgttttggaaagcacgattatcaagctctactccaaaggcgtaactaccagagaaatcgctgacttgattgagaaaatgtatggcagtcattatagtccagcccaagtatcaaatatttccaagcagatgctccccaaggttgaggcttatcacaagcgcaagctaagcgacaagtttttctgtgtctatttggatgcgacataccttcctttgcgccgagaaacgtttgagcgtgaagcagtctatattgccattggcattaaacctaatggacataaagaagtcattgactactgcattgcgcctagtgagaacattgaagtctggacagagatgcttcaaaacatgaagtccagaggcttgaagcaagttgagctctttctttctgatggtgttgttggcatgaaagcggccttgaccaggacttatcctaaagctcattttcaacgctgcttggttcatgtcatgcgcaatatctgtgctaaagtccgggtggatgaccgcgaaaagatcatgaacgaattcaagcagatacatcaacagacaagccaaaaagaagctgcagctgtcttgcatgaattttatgcaaaatggaataaagcttatagccatgttatcaaaggtttgagggaaattgagcccgatctgctggtcttctacaattatcccaaacaaatcagagcttcaatttattcaaccaacatgattgaatcctttaacaacgtcatcaagcgtaaagctaagcctaaggcagaatttccaactgaacagtcgcttgatgtatttattggcatccaggcaatgagctacaatgaccgctatttcaaccgaattcataaaggctttggtcaggttcaggataccttagaatcttattttgaataaataattaaaaaatcaatttgcgagaaagaactatttacacaaaagatttgacagtttcgaaattttcctttttgctatgtatttgaataatagatatacaaagaaaggaatttttaacaaataaaacgatttaggacactttataataaaacgcttaagactagtcaactaccctagactgaggtctagggtagttgacaattcatttattatcttcctattttttgctgttagaaaatttgtttaccatgatttttcaggatttttcaatttctctttttaagaacttgatccaacttgtttaaagttaatttctcacgagcaataagtttatttatcaacatattttgcttatcaattatatctaaaagctctgagtaagttggaattttttcattaactctagggacattcgtagttactggattttgctcattatgcttttactttagagcttgtatagctttatcagcaattacttcttgatatttcatttcctgttctttttttctaatatgtttttgccttaaatcgtaagctaatttcatttttaccatacctctatagttgtttcttattcattcgttactcattgtatggggcaacaaaatcataattacgttgtaatttacagatgacttcttttacggttgctgacttataaatattaagaacccgttgacgataagctttcatcatttcagaaattttaggtttcaaattaggattatctaagttgtagccctgtgctaaaagactgtaaccatttttaattgtaataatttgagctttcaatccgtgaaaaccatcttctgttggttcatttttatcaaaaatttgattagaacctgctacataatcaccttcacgtaatgaattgagtcttaaagccaaaatagcgtctctaataagacttacacgaaattgttcttgtgacattacttgtcctttctaaacaaaaaggtctcgctagaacgagacctttttttgtgttgcatagatgaaataaaaattgttaataatactaactatttcttaatagcatccttgagagtcttacctggtctgaaagctggaatcaaagttgctggaatcttaattttctcaccagtttgcggattgcgacccttacgttctgctcgactacgaacttcaaaactgccgaagccaaccaactgaaccttttcatctttacttaaagcttcagtgattgcactaaacactgcatctactgcatctgtagcatctttacgtgaaagatcagctctttcggcaacatctttaactaattctgatttattcatagaattacctctttacaacatattatgaatatttgcggtattttagatacctcactaaaaccaaagataactagcgtttatcgatcatttatccttgattcaatttcaatatacaagataaaaaaatctaaatcataaactctccagatagcaaaaaatacatccccaaaatggaaaacgctataaaatagttattcaatcaaagggatgcattttgtatatttaattttctttgctagtttgtttttccttatttttacgctgattcaaacgatgtttctctatttgaaaaaccttagccttaatgcctttgatattctgttggttttccttctgcttttgtgctataaatgcttcttgcaccgctgagtcattagcatatgtatcaaagattagctgtttaaaatcaattagatcaactagatcagcatcaatgctgtcaagggtcaataaacggtaaacaataacgtctttggtttgccccattcgatatactctactaatagcttgttgctcggtagatggcttccactgtggttcacaaagaatcacgatattagcagtctggatattaagacctaccccacctgcttctatttgactaagaagaacattgtatttggtagatttagtaaaatcactaattaattgctgtctttgacttggactaatatctccagataagacttcgttcatggatgtaggcaacaacttagccaatttaaacagtacatccctcttaaaaaaggaaaatacaattactttacgattcatctgcttagcttcactagcaatttctttaatctgtgcaattttttctgatgcattatcaataaatgctgccctgcgcattttaactagtccacccaagccttcttcaatacaagaatcatagaaatgttgttcttcttcattaaaggtagaccaccgctcaatgattgacatcttaggcaattctttaagaacttccttgcgttttcttcttagataaacagtagcaatcatttctttaaatttgctatcagatagttgtcctgcattaaaggcgtttctgatcttctgggataacgcggggttaagcgcttgaattaattgtttcatttcagacacgttgttttctaatggcgtaccagtcataaatagtttgtatgatgccttattagctaataaatatacgttttgggaacgtttggcttcgggattcttaatataatgtgcttcatcgacaattaaaatatctagctgacctaaatctttcttttctattaaacgtgagcattgctcataattggtcaataatactccaccttgatctaaccaagactgatattccttatcacgtttaacattacgaaagacataagtaggtagtttagaccatttatgaatctctattttccaattttccaggatacttaacggacaaactacaatagcgtatctgctacctatttgatataagtggttgattacaccaatagcttggatagtctttcctaaccccatttcatcccctaataagacgtttcgataggaaagaatatatttagtaccaaaatcttgataagctcgcatattcacagagagatctttagtgattaaaggaaaatgattaacctgttctacaatagctttaggcagagtggcagtaatttgtttttttccttggccagtaagcttttcaattagagaaaagtaaatcgcaccgttagcaataaaatctgctttaattcgtttaagactattgtctggtagttcatcaaacttaagattatctccagcttgatgaataactaatgctgactgataaatggattgagtagctttatgccagtctatgtagtcataagtactaacaaaattcaaatcataattagtaattgcaatagaatctcgaactgacttagctcttagcaaactacgataggactgaataatttgtttttcctgtgctttttgcttaaaggaataattattacaaaacttcaacaaacttaagaagcgaagcttatcagcagtcaaactttctgcattaaatatagggaatgcttctttagataatttctctacaacttgtttagccttggtaatgatcttttctgtatcaatgagtggcattgcatactgtgcttttaactcttgaggactaaaaatagctaaatcctgcaaggtaacattatcagctattaaagaatccaggttaggaaaatttggctcgttactacctaataacctaattgagtaacttgctatatctttagtagcttgttctttttgcaacttattccataatcggatcatttgttcatgataaacgggatagctatgttctttaagattgctgacgattgcgttaacttgatttaacacccatgtgataaagacatccccatgagataacagtctatccacatggggatgcattgtttgatataaagcgtctaagtaaaattgctttgattttttaactttctcttttactggaatatccccatgaaattcgtctttccaaaaaacaacttgactaataaaatcttcaattaactgaatattttgcttagtttcttgtttaacttgcctagactgaaaaatattgattaacgttcccaggtcattatgctctaactgattaagtactttctccaattcagataattgattgccatattgatctaagtatttttcaatttgaagcgaaatttgttctagccagaatagttcagctgtctctttagggatgctcttaccacctgcgttgtaaaacaaaggaatgtaattctgaaaaagtcgcgttttcaaaacatgattggataaagtgggaataccatctaacgtaatttgatacaattcagctggaatatctgcttgatagcgttcataatccctttgtttatattcgtctaccctctgcttaattgttaattttaagttaggtagaagttgttcatttaaataaacctttgcattaaataaatctttggctaactgattaatttcattggaattcattgataatctttccttaactgctccgctcgtttttgatttgataagaagaaacgacaaaataagaatcttatatatagcatacgttttaactcacaaaaatcgcacaaaactcaataatgaccaaaatgtgctaatagcgtaaagcaagacgacatttttaaggaattagaggtaaaacccattttcgatatttatgaagtaaagttatatttgaccgataaaattgaaaaaccagaaaggaactatacagctaatgaaagttagagttaataagaagaacacattactatttctgggaagttcggctatggcacttactggctcaaatgctttgggtcaaacagttcatgctgacacaaactcccctgctcaaacaacaaaggttgccgataaacctaagtccagtaaaacagatcaacaaaaacaaaaagaacatgatggctttactcttgtaacagttaaatcaggtgatactacttgggatattgctcaagaatacgatactaccgttgatgaaatcgttaaagataacaatttatctaatggtggtagcctaatccatattggggatattcttaaagttaaaagtggtaacagtaaaactgaatcaaatacccaatccgattcaacagcttcaagctttcaaactcaaaccagcgctaatgctacatcagtagaatcaaattcttacactggtacaggtgcatatcaagctcctgctcaaagctaccaagcaccacaacaaagccaagccactagtcaatcggcttcaactacctactctgcacctaagcaacaaacaacaaattacacttctagtgcaactggtagtgaaaaggccgctaaggaatggattgccgctcgtgaatcaggtggtagctacaccgctagaaacccttcatcaggtacttacggacggtaccaattaacacctgataagcttcatggcgatttatcacctgcaaatcaagaaaagactgcagatgcttatgttcgcgctcgttacggttcatggcaaaatgccaagagcttctggatgactcacagttggtattaagataactcatacttactagacattaagaatacctaatttgaacatcattcttacctaatgaaatgaactcctatttaaatagacggggcaagataaatatcttgccccgtcttcttaagtttaagaaatatgtagtaactataagaaaccataatagctactttataccttaatttaaggctggtataattgaagttagttacttttaattagatttgagtggttatatggatcaaaaacattatgctaaattaattgatgaagaattagataaactgcccttctatgtcaaagaattctacttggttaaaaatttatcaattactactaaataccagtacttaactgaaattagacgtttttttacttggcttagaacggaaggaatcagtaaagcttctgctaatactgatatggaactgactacacttgaacacttaagaagagaagatattatgatgtatcttgattacttaagaaatagcgtcaacaaacaaaacaagtacaactcccccactacaatcaatcgttcaattaatgccttgcgctcactatttcattatttaaccgtaatggcggataatcgtgacggagagccttacttctatcgcaacgtaatggctaagatcgaatcactccctgcttccaagacacttaattaccgtgcaactgaaattcaagcgcatatgtatcgtggtcaaatgaaacacgactttattgactttcttagcaacaaatacgaaggaaaagttagcaactacgtagctgggcactttaagaagaacaaagaacgtgatattgctttaatcgctttgatgttaggaactggggtccgtgtacaagaagcttcaaataccaatatcaatgatcttgaccttaaaatggggatgctcagcgttactcgcaagggtggtcaaagagactctgttccgattgccaactgggtgatgccatatctaaaagattatgttgcaattcgtaaggagcgttataagccagccgataatgaaaaagcactcttcttgacctcataccgtggtcacgctaaaagaattacttctaatgcgattgaaagctttgtctccaaatactccgaagcatttggcagaagactaacaccgcataagttacggcatacactagctagtgaattatatagtgaaacacattctcaagtattggtatctcaacagttaggacagcgaggaactagcgcaacggacttatacactcacgttgaccagactaagcaaaaagatgctttaaataaaataaaatagcaaaaaggctaatctattgcgattagcctttttgctattttacaaatcttatattcaaaactggatcctaggcaaaagttacgaaacagacgcaggaaaaagcaaaaataagaaaaacaaaaaagcatttctgctgagaaaaaactcaaacaaaaatgcttattaataatcagtaatgtgattcatgtactattaacccactaattcacctgcataagccagtaaacatccctcttgaccgagatcagatacaagcatatattgagctgaattccgaggaagatttacttgatatatgctttcaaacctatcagcataattttgcttggaaacatcacatggagtagcacaaagccaaattaatgaataataatctgaatgcaacagattcttaataacagaatcaatttttactacatctttaccacaatcatcttggtaatgggatgcaataaactcaggaatatctgtatttccaagtttattgatttcaaaatcaataacatctttgggacgattctttcccagcaatgaactgtaatcatcactacgaaatccaattccagatgctaagatacgtatagcttcacgactaatagtttttacttcaactgtattcttcattttttacctctttcaaaataaaaagtaattagttagaaaaaatactctaaattaattacttggttttagttgctaattaaaatgttaatcctgttctaaacgataaaggtctctagttacgcaatcaagaactctaggatagatttgatatttaaagtcttcttcatcaatctcttgaatctcaaaaacatcatttagccagtcatcaacccaatctcctgcatcagaagatgttttattaattggagcttctgaccattcaaaatgaagttcataagctttaaagttatttttatccgcacttatagcgtactcaaaaggtacgtcaccttgactggaagagacgagttcatctgtagcaaagaaaggataaaactttttcccttcaaaatttactacatcgccttgatagtacattctattgacgttcaataataattgcttagtttgttctttcatttttcttttcttaattaatcttctaaataagaattgaccaaaatttgtccgattctaccccaacttgcagagtccaagccagtttcctgacttaagtaatcggtaattcgatcatattcttcctgttcttcttcagatagatcagtaatattccattgatctggttttttcctcatttttctattcctcatttctaataacatcttgataaatatgagccaatttctgcgggactctaataggctctgggtcaaacgtattgtttacgatctgtacagcataaacaacgcttttgaagtaattgatagtccaataagaaatattttcttttcgttcaccagtaagaacttgatacatcaattgacttctgctaaagctaattagaatatcctgcagtgcttcacaaaccgtatctaggtcatacctgatttcagaaattatcttatctgtcgattctttgtcagtttcgttaagtacaaatatgctattaatattgttagccaaagctacactcttaactaaaccagttttatatagcaaattactattgtgcatagccataaaatagctgttcatcaaaaggtagtatcctcgctgaatgtagtagaaatcatcagcaaattcgtctgatggttctaatcctaattctcgcaaagagtagaaataatttggcaaagagctaattgcttcgccaactacctgtaccttaatttgttcttcttgaatcaatttagtttgtatagatgttaaatagttcattattttacctctttttaattagaatagtgatagttgatcgtacttgcagtcagttttaggcataagattagatgtcttctcaaatctaggagaagtatctgcaacttcaaatgagggcttaggtgctagaaattcagcgatgctatctttcaaagcaggaaaacgatcatcaaaataattgaaaacttcttcttttatgtttgaaaagcataaatactcatatctagtttttcctgcgtatagttcgggctttttaataagtgagttattaaaacccaagtgcgaaacatacaattcgaatgctcttgcaaaaacttctgttggggttaataaatagtttagcccacgtttaccaacagtaatttcaccttgtaaagcacattcattcaaatagacagcaacattgctgacaatcttgttggtgaagttatcttgcaatgataaagcaatgctatcagaatgataatcaagaaaatgaccatattcatgaataaacgattgtaaaccaggctgaccatttatttctcgaaaatctaaagcaatagtattgttaaaggtggtaaacatccctaacgccttatggttttgtaattttctgaaacgaagaattggtttagctccgtcacttgctttaggtagaaaaggtaaagtagcagtaatttctggtactaatttatgaagcttggttagatcaacatcgttatcaatctcaactcctgcaagataatcagaccaagaattactaagtctttgcatttcttttaaattttcctttttaatattcctcttttgctgataaaatctcgcatgagacatacccaattgatcgtcttcatactttgcttgtaagaaaaaggaatatgtatttaataaataatgtttaactttatcaataaaagcatttctgacaataagctcttctacatcaggtttagaccaaatgtgatctttgtattccaaatagcaagcttcatcatcgggatcaaaagaaccgtactttaaagcttcatcaataagtgtgtctttttcaaaccgataagtatatttgcgatattcaggattaaataaatcacgtgtaatttcagcatatttaagtgcaacgtctctttcagtaatttgagcttttttagtgattgaactaatgtcgtcaaaagaaatttcacgtttcatttcgtcaagtagctttaccttgccaataagaatatttccgtgataaacatgtacctctctattgccagtaatcttaagttcacttaactttttagttcccatcgagtatctccaatgccatgattgagctgcatattcaatatggctatttaatggatcaacaataataaccgactttttacctttatcatttgtagctaagtaaatgtgattttcccaagattcatcagtatattttgctcttttaaagtcacaagcggaattaatcatatctaactcaaattgagtgatctgaaaatctccttcttttactgattcatctggtagtaaaactctttgcaagtttttaactgatgagtcaagctctttaataccactgataaaatcttgttcagtccaatcatcatttgctaaaccattcttgtagataaattttgcagttttattaaacatttcgtaaatggtatctttagggctaagtgcgattgtcttagtaattctacttagaccatacttttcaggcattaaatctgtaattttcttcattttttgtacctcaaaatcaaaaaaagagaataaccaatacggttattctctaactacttattaataaaattcggcaaccttaccacttggtgataagtagtgatagctttcatcccaagtatttgctatagcttttcctaaccccttgagatcaataaaatcataaatccttggggcaccatgataaattttatagttacttaaatcgacattaagactatcgtagtaccagccttcaacgatttcatggtctgcaaaggtctcaagatcatcataaatgtcaatctcttcagacgatttaatttctgaacgtgcttctttaagttcttttgccaaatcaggatcaaacgttcttaattcatctaaatccttgtattgggtgtaatattcaaatttttccataattaagctcctataatacttaaacattacaaattagaaatgatacggtcaacttcatttggctcgacttcgatagcaatttctttgccatccttgtcgtacaaagtaaaactttgtgagccaaaattgaattattgactttttctaataattaatgaactttatttgcaacagagtagttacgtaattcttctaagcctgaaaaatcgcctttcaggacctttttaaggtcaaaggttaattcttctggttcgtagaaaactccataccagttatgagaattatcgtctcttccaaagaaattgaagataacatcattgttaaaaggcaaaatgtcaaaatgcttgaaaagctttttgacaattaccttgttgtatagggtcctatattgatctacgtaacgttggtcaaagccttcttcgttaaacgcagtgaagtctaaatacttcacatcgtttttatcaagaaaactaagcgtgccacgaactgttctttgtcttttcatttgctaatacctctttttactttcttttcatgactgaattacaggttagcaataaaactattagcttcatcttcatcaagatccgttgcaagctcgttgccatctgaatcataaagatcaaatgtttcagagcaacgattaaactcttgattttcactaaatgatccctgttcaattgcatcttgaacaatatcatctactgaagaaaagttttctgttgaattgctttgatctacttcatgactagcaaagtcagtgaagtcccaacgtgcgttaattctgccaccatctgccaaaaattctttaattgtcattgttaatacctcttttaactttcattcatagctgaattacagattagtaatgaaattagttgaatgccattcatcgcaattctttaaaacatacaacttaaaataactgttacataaaaacttttttccccgtatttttacctttaatcaacacaaatcgagctgaatattactcttcaatacagctggactgtacttgcttggcacagccgactgaacatccacacaatcagatgcaacatcgtcagtgcagattttggccaactttgcacaatatccagaagcttcaggatcaagctcatatggtttaagctctgccattgcctgcatttctgatttattcagtgtatgcaagtaacattcagggtccattccatcaccaagcatgattaagccatactcgcttccaaaatctttcatatgagctaatccttcttcgggatcagtagaagaccatacggaagtgattcgacttttgtgccaatcttcattgtttctatcaagctgaatatctcttttcaaatcagccaaataagccttgatatcaactaagataaagctcatttcactattctttgggaaagggatacttagcagtttttctttagaaactgtatgtgtaagtttttgcacttttcattaccttcttttttcttaattcttttgtgaacagatctgctaaagcctgtctgtcacaaaaatctaattttcttaacattttatttacctcacttactcattaatttgcatgacctaaaatcatgtcaatttcttttttgtgtgctgaagggtcattgcgatgaatgcgtaaataatcgcaaagctgcttgctattttcaggatgaaaaacatcaaagtcagagacttcgacatcattgtcaatctgaatcacatcagaagcttcacaataattcaccggtggccaaccaggttcaactaggtagcccagcatgcaatcaatatcttcaggattactgcttgctaaataggctttcaaatctgaataattatgaaatctgtgaggatcactgtttcgattcatattgagatatgccaagtaaaaagcagtggtaatagtagctctttccaacgtgttatcgttaggatctaggccataaaccgtaaactttttacccactaagccgaaatcgacagcttcctgtaagattactttttcttccattttgtttctccttcaaaacaaaaagagaccaatcatcttagactgctctcctcaattacttattaacttcaacaacaaattattaatgataactaacttatcaataatcactcctttctacatttgcttactcatcaacatgccgacaattaactcgcattaatcatctcctttctatttttcatatcaaaaaggaacattgaaattgttcaatgctcctttattacttatcagtttaatttttttacgcatgacttatcaaaagataaatcaagacctacttaagacatactactgcttcaatggaagcaataaaactaaataaaccacctaatacgtcaaatgtgacgctgttacaactttttaaagctgtctgaaaaaataaaaatttcaataatgatttacaagttaattatagcatacagatactagtttcaggacaaaaaaatagcatttcctactgtggagaaaatattccaacaaatagaaaacgctagataattagattatgttatgccattaaattacttaaacaagcctttgattgacttcaaaaggttgacaacatattcgatttgaaccttttcagtactaagcttttgatgattattaataagatcattctcaaatgcctgagttgcatactgaatgaaatagtagcaagctatacaaattatcaaataacccaaatcagaataatccgagttaacgactgcatttgccaatgctacaccaccagtaattaaatccagtagaagcgctaaagccaacaaaaacagcgcaaaacgctcgatttcaaaaagatcatcagtgatgagttgttcacgttgcttcatgcgcaatcctttttgatactgaactctggtcaacctttttttagtattcatagtttttacctccgtatgaattatttaattctttaggaaagctactacttgttgttaagttttggtaatgcccaaagctattattcaataagtagtcacagaccttcttttcataaacaatcgcactaatagatagcttcatcttcaatgatgtctaaagaaattggattgttcttgctccaagcttcattatcatcataaagagacaaacagtttattttatgaaatctcaataaactattagagttttctttgacaagcacaggaatttctctcttaatgcggtaaatatgtttaaactttactaaagcctctgatacagttaaaagcctactatcctttttatcatgttgaatatcaacatcaacaattaaagggttttgcttaaaaccaaagaacttacttacttcctttggtaaaaaaatcacggaaatatcagagatacccccaatagaattcaccacttgcattacttacatacaatggcaatttaccttgattaggataactagctattcctaagtatttatcaatttcgtcaatgatgcttttcaatttcattgatggaaagttgctcaaacgatccttcatatcattaaattcctttatttgggcaatcaatggaataatttgctcacgatcccaatttggattaacagtttgaatcaatttaaccaaagtctcttgactcaatacccgatcaagcttgttatctcgtataaatctcagagtagcaagagtagattgagttcttcctgcattaataccatctaaataaagacgattttctttgttcatcattttctcctttaaacacccggatttaaaattgaagtgcaacactaagtgttaaacaaaaaggccatgaagacctaaacttgaagtgacgaaaaatcaagaaaggaagatcttcatgaccaattcaaattctagcatttctaagcactatcatcaattaaccagcgtacaacgtggacaaattcaagcaatgctggattccggcataacttcccgtactgttatcgctcaagaagttggctgccataagtcgacaatcagtcgcgaaatcaaacgcggaagcgtcctgcaaagagacagcagctatttattgtatgagcactattacgctgatactgcacagatttattatgagaagcgtcgcaaaaactgctatcagcgcaatccattgaagcattatgctgtctttttgagaatgctctccagacgctttaaagctaaatttgatgccaccagcatcgatgagttcgttggtgaattcaaaaggactatgccaggctacccttgtcccagcacaccaaccgtctatcgctatattgatcagggcttgctggacataagcaatattgatctgcctatgaagctcaaaagacgcaggaacaagcgtcatcacagccatggcggtcacgctttgcacaagaagcatcttggcaattccattgaacagcgtcctaaggaggttgaagacagaaaagctccgctgcactgggaaggagatctggttaaaggcgtcagacgcaagaatcagcctgctttaatgactttgactgaaagaaccacacgctttgaagtagttatcaagattcctgactatcgggcaagcacatgccaaaggctgcttcaaaaggagattgacagacatcctgcctggtttaaatcaatcacgtttgacaatggctctgagtttgcggatatgaccaagatcaagggctgccagatttactttgctcacccatattctccatgggaaaggggcaccaatgagaactgcaatggtcttttgcgtcaattcttccctaagggcaagagcatgaaagacaagtcaaaagcttatgttcaacaggcaactgatgccattaaccacaaatatcgccgaatcctccaatatcacacagcagaggaactcttcaagcaatatatctcttcataacctaactgttgcacttaatttgacaattcaggtctcctttaaacaaaaaataatacttatattttgcaaaatacaagtattacttttcctaataagtttaaccactaagtagtcatatactctaatacatgtctcttgtagtctttctttatacaattaagtactttagcccaaaatacccgtaacttcatatctttgtttgtcgttatcaatttgataaacgtaagtaaatccatcaaaagttcgatataccttatcaggagtgtcactgtaagtataagtttgaacagtaaacatcttaccatctttcattggcttattagtgtctcttgatggaacccagcgctttttgccgactttataccaagtttgtcctgctatagtaattacttgatagactttaaaagtaccaccatttttagtttcaataatgctatcaactctaaatgatggaacaatatgcagaactgcatgaccgccaatatcaattttgacagtaaacatggcattcttcacatgtgaacgagcttgattttttctactgtcttagcagtacgaacgcttgcttgtactggcttagagttgcttgcaatcaagccacttagcatgaataaacctgctaaagcaacaacaataacgacatttttaatgttaatttttctcatttttatacctctcttagcaatctgttttactcattcgtttatcgtttaagcgtaataataaactgattttttagcgggtaccatattgtaagccttactcatgtactcgcttaccatttcatcatcagtagttaaaccagccacataacgagatttacaccaatcatcttcattagaaaaaccagagctattacatggcaaaattgtaacggctgtaccatataaaatgttttcgaaaacatcagtaaatgtttcaccgtcgaaattactctgataatcatctttaaacttttcatcagcattaactggttcttcatcagtaaagtcgtaataccaaacgtatgctaattcaccttgagaaaaaccagtaactcgccaaaaatggtattttgtgtcttcaaatgcgttattaaagtaatcaaagacaatatattccagatcagaccaattaattagcgaaaatgaagatggaaagtcgttaataataccttcgtctccagtttctaattcatttaagaaatcttgctgagtacttccatcgtactgatgctcagtaaaatactcatcgaattcatcttggatttttattggatttaagccatgattagcacgaatttgattacacaaattcattttttgacggaaattaagcttcttaaacacttgaaataggtcaacaacctgctgtgtatcaagtgctccaaagtgtgtagcttcaccagcaataaaatgaaagccgaattcctcccaattagctttgctaatttgcaaagtatcaaagtcggttggtaatactttcataaattgattactttttgcgtttacataaactgtcattttaataattcctttcattaatttcttatcttgtgctgtcaacttgagctagtctttgtttaacttgcctaatcaagtcattcataggaactggcttaacagttgtttctttttcctttttttcaactttatgcggttgtttttctgaagaagcggccttttttcgatattcttctctagttgtttttttagcgtaagaaaactctctttgagatttcttaggttgattaactggagcagaagataaatcatacaaagtatgaatttcaccattactatcagctaagatcgtatcagcattaaactttgaaatatttgattcttcaatgttggtttcctgcttactattttctttaatagtgttattcttagcttcctttttaggggatgccttagtctgaaacaaggttaaatactgagctttcaaaatatccttacgaacattcattggaattgatgtttggttcaattcttttgccatttcgacaggatcttgttttgaagaagcagatttaggttctgaaaaagctaatttcagttttttccaaaccaatttaacgatttgcttatgcttgctatcaaagcgataaactaagtaagcaacaaccataaaacagaataacttaaacattttaaatacctcttaaaaaacaaaaagagaccaatcatcttagattgctctcctcaattacttattaacttcaacaacaaattattaatgataactaacttaccaataatcactcctttctacatttgcttactcatcaacatgccgacaattaactcgcattaatcatctcctttctatttttcatatcaaaaaggaacattgaaattgttcaatgttcctttattacttatcagtttaaattttttacgcatgacttatcaaaagataaatcaagacctacttaagacatactactgcttcaatggaagcaataaaactaaataaaccacctaatacgtcaaatgtgacgctgttacaactttaaaaagctgtctgaaaaaataaaaatttcaataatgatttacaagttaattatagcatgtaacaccattatttagtaactaacgattttaattttcaaaaaaggaaagggagactgtaaaatagtttgtgtaaggatgaatgattccttaaatttatttctttaaacattagaaaaaggagttcctttctcgtatgattggtttgaacaaaaaaaacacatacagaaagaagaactccttcatgaatgattttaccaaagattttgctcaagctctattcaatccagacaaaataaatgatttattgcgcaaagaactacaacaggctgttaataacttgctagaagctgaattgactgcctttctgggctatgatccctatgccagaaatggctggaatactggcaactctagaaatggtgcttatttccgcaaagttgatacgcaatttggcccaattgaagtgcaagtgcctcgggatcgcaacggtcaatttcatcagcacacgctgcctgactacaagcagcactcggatatcttggaaagcatgattatcaagctttactccaagggcgtgaccaccagggaaatagccgatctaattgaaaagatgtatggcagccattacagtccagctcaggtatcaaatatttccaagcagatgattccaaaggttgaggcttaccacaaacgcaagctaagcgacaagtttttctgcgtctatttggatgcgacataccttcctttgcgccgagaaacgtttgagcgtgaagcagtctatattgccattggcattaaacctaatggacataaggaagtcattgactactgcattgctcctagtgagaacattgaagtctggacagagatgcttcaaaacatgaagtccagaggcttgaagcaagttgaactctttctttctgatggtgttgttggcatgaaaacagccttggccaggacttatcctaaagctcattttcaacgctgtttggttcatgtcatgcgcaatatctgcgctaaagtacgcgtcgacgatcgtgaaaagatcatgaacgaattcaaacaggtgcatcaacagacaaacaaagaagaagccacagctgtcctgcatgacttctataccaaatggggcaaggtttacagccatgttatcagaagcttgaaagacatagaaccagatctgctggtcttttataactatcccaagcagatcagagcttcaatttattcgactaacatgattgaatcatttaacaatgtgatcaagcgcaaagctaagcctaaggcagagtttccaactgaacagtcgcttgatgcttttattggtattcaggcaatgagctacaatgaccgttatttcaatcgaattcataaaggctttggtcaggttcaggacaccttagaatcctactttgattaaataaataattaaaaaatcaatttacgagaaagaactatttacacaaaagatttgacagtttctgttttctagttcttgcttaaatttactattacttaatagtcctaatttggtttctaaattatttttagctttgaattcatcccaatcgtattcaaatgtatcaagctttccatcttcccgaaattcgttacacaatgactttacatcaataacgaattttcttttgccaactaatacattacttttaatcagcctattcaaaacttgaactaactcttcctcatctaagcggaaatatttatcctgaatagttttaatgtaactggcaatcatgtagcctgaattagctttttgtgctaaatcatttgctttatcagcactaagtatcttacgcattttattctttaataccccattctacacacaacattgcatcccttttaagctcacaatctttatactttgcaagaatctttcttgaatcgaagccatgagacacaattacagcgtaattatgtacagtcttatgaacttcaatctcattttccttaaagccttctagtgttaagtcttcaacaaaacggtccaaatccttggaactatcatagtcaaataaccatttatgttcagcggcattttgtggttgcattgccaaacttgtaactttactttctaatttggttgcggaaaaagtaggatgatctagcaaataatgttgcaagtccttaattgttgattcattgtttcgttcgttaacggaaatataaaagcggcttagttcacccttaacacctctagcaacaaaggcatcaaattttccttttagctcatcaagacttttatcagttaaaaaagaaatctttctttgcttaaaatctttaacatccttattgtctttatttctggaaacaaaaaatacacctttcatgatttttcccccgtacatatcgagattttatgaatacagcttctcatttgttgcctcgctttcagctacctttgataaatatgcaagaatatttttttcatcatacttgtgcattctttttatgattttgttgaaacaccatgaggcggcctttaagcgagtttctgaatcaagatttgaatatttctcagagccttctacaaaaatgtcagtgcttcaaagtattcttcaatctctttattttctttctttttcttattgtttttctcattgatgaatatattattgaacgcgtggtgctagttaaatcgttctagacaataagccaaattataagctaaaattacaatttccaaccggctttgaaagcctatcagactacgtgctcgattgttctcggcattgtaataggtcagaagcgaaaagtcgctttcaattgttctgcgaatagccatcaattgatgatcattgtgctttttagctcctgtcatatttttacgatatggtgtccaaagttcataacccatttgttttagctgttgatgcagttctttgcctaaatagccttcgtcgccaagaagatagtaattagatggatgggcattttccagcagttcaactgtctccttggcatcatgaactgatgcttttgttacgacataatcaagaatggaaccgtcatcgctaacaatggcatgaactttgaaaccatagaagtaaattttcttggtggccttataaccaatgttggcataaccgcgaaaaattttagcacgatagttgcgaattggttggcaaacaggtaccggaaagctgtcaatgatcaagaaatgtccattcaggtcaacctttttattcatttcttgccgtatctgataaatcaattgcaatagctgacgtgaacgccgattaaaacgtgagtgtgataaacaattgaaacattcacagaatcttctttgtgattcaattcctgtcttagcttgccagataagtaaagccaaaatcagactgtccgtagttttaatttgatcaatatttcgccgatgagtaaactcagccggtgcatacaaacgataccagtgccgacaaattatcactaaatctttaaaactaacttgtaaatggtggctaaaacgcttaagcttaaggcagttcaatcagatcagactcttttctattattactatttacaagtcgagtctaacaagattggacttttttattaactaaaacgatttaactagcaccacgcgtattattgaatatatttgtcatttgaattactccttttttattaccgtcaaagcacaaatgcctttcactatctttttattagctcatttagaaacattggcaaagtagttggaactacaaacttgaccatgacaaatgtcgttaagcaaattagtgatattgtaactacccatctaaagaaattttcacgactcggatcaaagacgaatatatagagcaaagtcataatgagacaagctaaaaatcctattaaaaccattatcaattgcataaatgcaattttgcctgttactttgccaaaatctattgttttactaagatcgtaggcaaaattaccaactagcatggttacaattgttgctagaaatattatgatttttacatatttactatcattcattttttgtctttctctttctctttatttggattgttatgataacgtaaatctttccttaaatgtcatcatcattacgctcttttttttcgttatgtaatataactttagggcataactcctcaaagtcatatctgctccttatttggtaacaagattcggttgcatggtatctgttttcaattttatggtcgtctgaaatcttagtagcataaatctgtggaaacaggttcatattaatgctacctaaaccattgtggttacgttctttcaattgttgtcctgtagtgattttggcatttactagggatgcaaaaaaactttttgtaccaaaatctaagaagttgtctaacagttttgaaattttatcgtagtcaacattgtctccaaagtcataagccatatcggttaaatctaacttggcatcacaatattcattacagatagtcagtaaattaatcattagtagcaagcttggcaaaaacctaattccagaataaaagctctgcgcgccaaatacattctgaataccgcatttaaacggatcgaccttatggtttaattcgctaaaagagaacatacagctatcggtgtcaggataatccttgtgacgtacaactcctttgttgtagaaatcaaaactagcagaactgttatcattattgacttcaagcgggactatcaccttacgggtaaaatgagctggcatcaaattttctggatgaaactcatatttttctactacctcaagttgatattgcatatttgcttttagccttggaagcggcaatagaatgccataaaatctcttatttctatccttgatatatggaaagatcatagacttgttaggcactggcgaaccaaatttaaaatcattgattgaatagtccatcagctttctagcattgctgtcaaaaagtcttacatcaacattcattttccaactcttaggctcattaaatacaatttgtggctgtaagctttcaacatctaaaatttcttttggaatctcctgttctgggtgtgctttcaaataagcactagctttagtcattttttctaaatcaatttcttcaaaaaaattctcatcaattaccattgactgaatttttggagtgtaataaaaaacgttaggcttatcaaatgctactggcatatcagtttgttcatgcatatgcctttgaattgcttttaaaaagccgagtccaaactcgtctgcgctaagtgttttagtagtcatctatcttattccttctctttaattgtgaactgtgaatttttgcagttctctatttactttctttttaagctcttttttttcatgttttttcagccattgctgattgataacgggcttgccatttttatcgattctaggcgtaatccctccattatttcgaatcaggatatactcaacgcctgttttttcgtcaaccatgatcgcagaccctagattaagttcctcatttaatgtagtaatattctcacctttaacattatcagcactagcacttttgctctcttcgcaagccgataaggtcaacattgccaaaagtatggtagtcgtagccaaaagattcttcttagtaaaaaccactatagacacttcctttgcgataagttactgtttctcttccaaactcaaagaatttggaagtttagcaattgcttcttctaaggggatattatgtggaataccatatagaccaatgatgccatacctattacgcaagtaatgtttgtcttctgttgttaatgaaaaatgttccaatacatcattaacaatctcattaagtttgtttacgcctgttttggtgtaataattattaggtgagctaatagcaataaacattccattatcgaatctaatagttaaatcatgagttcttacttctactacacttttgtcatttttactaattaattttcttattaccatcatttgtatctttcttaatttaaactgttccaactttcaactaatttctttcgttgctttggcaatattttggcaaaataaaacaattctcttaaagctctaggcaaagcaattaattcatcatatgtgggagtgcggttagtgtggcatctgtacgtcaatagctcattagtcatgcgcaacatggaatttatatctaagctcatgcacgcttgtcgttgatacaggtctcgccataatgatttatcgttagacatgttgtgcctgtaatatgggatctctaatttagtaatcacatctcgttcattgactcgccatagacgataaatagcatatggcactagcaaatctaatttagcagtagcaggacgaatgcattgaatttgattgtctttatctaaaaagtacaaacctgtttcaggaaatacgattttttctacgttctcaagataaccctgttttgtcaatatttacgttggcaaacgccttatagtattgtcgtatttgctcaggcagtcttttcaaagtatctaaatccgatttgatttcccacacagtagaattattatcgtttgcttgatctaaagtaatgaagtcacagattgccttgcctaatctccattcctttaaagcacctactcgatgatctttcaatttaggcaaaaccaactgattgaatagttcatttttgtagaaatattcattgcggtgattttctgccatataagaatagattttgctaatgctttcaaagtagctattatgcacattaaggtctacatatggatttttcataatttctaaattactgggactaaaatgttctaaggactttaacagttgattactaaagcacctattaaaccaaagatcattgtcttttttcctagtcatttaatttttctttcctatattaatgttgtgcaatgtagttaatcaccttttgagcgattgaaccgtaatttaccaagaagtagcaactagtcactgtcatagctaaagtcaaagcaatgtaaccttgtaacaatctactttccagaactaatttctttgatcttgattcagtaagttctgcttggggattattgatctgttttctaattaagtaattggcaaccaagcctaaagcaattaagactactgtcaccgaaacaattaagaagaattgcaattctgcattgctgtactgagcatttaagtgttctagtttccaatcaacatacattatttcttatcctccatatatttttttatgacctgatcggcttctctgcttgttcccattaccaataagttgtctccattattggtagttaccgtatatctttgttctctgggaatgtattgcttcttatctactacctttgtagcaattacttcatcaaatttaagcaaatctctggtactattaattttaattgcaccgtcttttttgatgtgatacagttcgtgacttagtgcccttgtattaactgtgtatgcagttggaactacatattcaattgtgatcttgccgtaattacgcagaaattcctcaatttttttgttattcattgcttttttcctctttcaacaaccaaaataaggctcctggcgttaagatcaagccactggtagaaacgattgccatcagcttaaccatttttatgacgaagcgatcagacgctatcaaagtaacaacagtacaaaaaactgcgacaactaacaaaattccaattacaaccagtatttttttaattgccctgtcagtgtatttgttcattctgatattcctttcaaaagacacgctgaagtgccattcttggcagacttaaaaatgcttgattagctcaaacacgattaaccaaaagatcaatccaaaaccaatggaagctccgaaagtttcaattacatacagaacaaagtcattttctgccatcttgcctgttttgcttaaagattgttttgcctttaattccgttcgggtcaaaccgccaccacgtttaatttttgatctatttttttctggcctgatagcatttagtcttacttgcaagttaattttcttctgttcttgttttggcatgattatttcctatcttttctagtgtgcagtcgtctgtctaggatcagcaattcctgttacttcttccattcctcgtcttgtgacaacaatcgtattgccaaacttacgccaactacccctaggccatttctctgggtgaaaattgatactagcacgtacataatcagggtttttatgccaaatcatagacgcatctttggcgctcataatttctggattgtgtaagttaatcatgctatcgctcactttccaaccttattttattaaatttaaaatgcaatttctggttttctccagacgcttagtacatgtatttttgtggactattgaaccacgctaaatgattcttgcttaatcgctcatctaggctcaagtctttatcattcatctcatagctagtcttattatcttgaattccgtagatttcagtagataccagtcgattgtctttcatttgctcctcaatgcttttatgatggtgcgttttaaacataatcgtcacacttttccttcatatattatttaccgtgtagtttctaccgtgtgaaagtacagtactgtcttatcatcttttttttttacgctaacgacataaccaacagtaaatctaccagtagcaactctatacttgcgatcaatttcttcaaaagcataccaatgctttggctcaaaaatatcggtcttgggtaaattgattggttgcagttgaccattattttcacccattggagggatgtcgctgtgaatcacactatcaaagtgatccatgtaaacctgcactactgcatctactccgataatcggataaactgcaatatcggttagttcaatatcttgtaagtcttttggtacccctccacccaatttgtttgcttctttttgtgctttgagttgaaattcttctagtcctctattccctacctctttaagcaagactttgcgctgatttaagaaccgagtaaacattggttgcaatcgcttaataagttctactcttgattcagatggattgataactccttctggtttgatcttgttatattgtttggtaaaatcttctgtataaaagatcgaccgactaagaccatcaaagatgtaagccatagccctatccgtatcatgactatatttcggatagtctaaagcaagataatacttatcaccatctacataaaatgggtggcaagctactcgatcccaattaccaaaaaggttcggaaaagtagctaatactggatggtccgcaaaggtaatttcactcataatcccgcaactcctaacttcttagtccctaaaacgacataacctggcatctgcttaaaattggttaaataagtgattaagcagtggatcttgcgaccagtgtattccttggtcattggatcgtattcctccagaataagcaattcgcctacttggtagttacgatcattctttctaatctcaaaatttttagaaccgttagcttgtgcttcgtagtagctaggaaagatttttactcgatgttctttaatttcatacgctccgtctgttgtaaatgctttcatttaattttttctttctatttcttgttgttaaaacaatcatagttaatttaaaatgcgatttctggttttctctaatttgtgttaaatgctactttatactatgaaacaaccgctgttttctaacgtaaatgcatagaaaaaaacctattaaatacggtttgttgataccatatttaataggtttctatttggttaagccttacttttgaactgaatttagtcttctctaattacgtgtttcaacaacaaatctgataccctgataacctgagtaattgtaattgtaccaagagagtccaggcttcgtttcccaaacagcttttgttccaattgcggttcttcttggatttaacaaactatctctgtgtgcccaatttgcactagcatcatgatagataaatgtatctaacaaatcttttgctacactttgtggcgttgaactagaatttgccatagccatagctaattcttctatatgcattgtggtctcaccatttggacgctcatgagaaaacttttgtaaaatttcttgacctcgtgtatcggcataagattgtagctcagagtttgtttgcaaaggttgtaatcctttggaagtacggagttcgtttaattgcttgataaattgcgttgatacttcttgtgcaaattgaggtgtaacaacattgctcaatgatgagctagattgtgtgttgtcttctttagcaggaacatttgaactgtttttctgggtatcttgcttttgattactattattagtagaagtaacggatgaattttcagccgtatcagcatttttagtttctacattattcgtttttacaccatatttatctgtatcagtagcaggcaaccatttatttttacccactttgtaccaagctttaccattaacattttcttttgcgtaaacttttacagattgtccaatcccaatgtactcaccagtaggtgattgattaggggctttataaatttcacccaatccattttctgtaatttttgcagtgaacaaatagtttgattttgtgttttgtacatttgcaagcttgatatagcgatgattaccaatgtataaatattttctaccgtgaatttttttagtatgaaaagcttttacacttctgcctttcttgagtgttcttgctcctttaatacgcttgcctttgtagttgtaaacataagcattgtgtgtaagccttacacttctagtgcttgcttctactacattggcttgttcattgccagcaacaactgtagctgaaagcaatagagctgatgaaagcgtaatagtcgataaaactttagtgatcttctttttttgtaacatgttagttacctcctatatttcttatttcaatttctaaattaataatacatgatggaaaaatgcatttcataaaaactctacgattttttaaaaaagttggatttttttgaaatcagaagggaccccccctaaaaatcaaaagtagatttatgataagaatacagatttcgggggttatctgtgatttataatccaacaaagaaggagataaaatatggaaaaaagcaatggttataaagaccatacagatctcaagagtcgtaagggaattaaaattctctccgctttaagcatggctttacctatctttatgcaatcgggacaacatatttttgccgatgatttaaagaaatataaatcaatcccagcaaatattacagttgccaatcgcccaactgaacctggttctttaggctgggctactgtggttgcaaataatggtgctagagatcaatacgcggggaactgggttgacacagatggtaatgtatattactgtcttgatcctaacttagcggctccagataaaggaagcaaatctacacacaaagataatgctagtggagcagtacgtgctgtcttaagagcaggctatccatctcattcagcggccgaactgggtgtaggtaatcataaatatatggctatgtttgctacccagctagctgtatggcatgaaggtcaaagtacaaaatcgattacgatccataatgccacagtaaaaaagctttatgaaaagattttggccgatgccaaaaaacaaacaggttctggacttactaaacttaagatcacagctactaacgttgataaagaaaaaggttcagctactttaactattaataagacagaagacttagataaagtaaaagataatgttactatccatctaactaatcttaaggctacacaggatggaaaagcagttacaacaactgcaaaagctggtactccaattcaagttcagttagaggataaatctaaaaatgggtctatgtccgctaccgccaattcatataccacagagacacctatttactacactccaggtaaacaacgtggtgtaacgatgattaaagttcacaaaggaactgttaaagatgattggagcttcacatctaccccaaagcctccaacgccagaacattctgagatcaaggcaatgtttgacttgaagaaaaacgatgatgagggcgatcaggtcgatcaggccaaatttgacgtttacgagtctgattccaactggtctcaaggcaagttcatcggtaccattactaccaacaaaaacggcgtagccagatcgggcgagcttgatcctggctactatattgcaatcgaacgtagcacgggcaaaaatctggacattaacaagactccagtccacattgacttaaccgaagccaacttgaaggaaaacgccaaggtaacccatgtcaagactccagacggcaagccttacgacttgtatcatctggatgtggacggcccgatcaacaaccacaagaagcccaagatcacttctaaattgaccaatctggaagacaatacccagtttgctcagccgatccacggcccagtagccctgaacgagcatctttacttctcccacctggtggggacggtaacctacaatgttcgtgcctggctgatggacaagacgacgggccagccagtaacgatcaatggccaaaagatcgaagcatccaagacgattgggtcaagaaacaatgacactaatgatgatggtatcgaagaccagactgatttacagttaaagatcccagacgcatcaagtttggcaggtcatgacattgtggcctactcggaaattgcccgtagcgataagccagaccactggacggctttgcacgaggacatcaacgacaaacaggaaacggtccacttctctaagccatcgattcataccaacgcggtcaacgcagaaaccaacggcaagaaattacagccgaccgatggcgagaccatcaacgatacggtaacctacaaggagctgatccctggcaagacctatactttaaagggaattgtgatggacaaggaaactggcaaggccgtcttgaacaatggccaaaaggtcgaatttaccaagacctttacggctaatgacgctaatggcgaagtcactgcatcagttaaatttgacgctcaccactaccgcaaccaccgtttggtagtctttgaaagtctttactacaccgactacctattaacggatcaccgcgacattaatgatgtcaaccaatcgcttgacgtaaccaatccgcaactgcatactaccttaagcgacaacacgcagaagctggtatcgcctaaggccctgaatacggttgaggatgtaatccgctacaccgatttgattcctggccaaacttattcagtcagaggtaaactgatcgaccaggtaacaggtgcccctgtcatgaagcgcggggttcctgtcatggccacggctacctttaagccaaacatggctaacggcacggtaactttaacctttgtttttgacggtacccaatatactggtcaccacctgactgcctttgagagcttgtacacgaacggcagaattttggttgagcatgccaacctcgatgatgcatcacagaccatctcggttgacaacaagcatgacaatgtaaccccaaccccaattcctgttccgacaccaaccccaactccaggcggtggcggcagtaccattattaataacaataataataacaacaataataattcatcaaataacggaaacaataataacgggaacaacggaaacaactcatccaacaatggatcgaacaattccgctaacaatggatcaaacaactctggcaacaacggtgccaataacggaaacaatggctccaataatgcagggaacaatggcaacaacggctacaatggttacaacaatgcaggaagcaacggtgccaacaacggcaataatggcgcaaacaaccagcaggctgttgccaacaatggcaatagccatgccaacgttgtccgtcatgcagttcggactagcaagccttgtcaaaacaagcgagtagctcgtgccaacaatgcttgtcaaaacaagcaagtggctcgtcctaacactgcagtagttaagactccagcccgtcagactgcacctgcatctggctcagtcttgccaactgcttcaatggttgcccagccagccgaaaagacagcttccgcaagccaaattttgccagcacaatcgcctgcttcatcaggcacattgccacaaacaggctcgggcaaggacactatgcttcaaagcttgggcgctgtaaccttggcaagtgcaatcggcacctttgtctacttcaccagacgcaagcagacaacaggcatggaataaggcgaaaagaaaaagctaagcaaaaacttagcttttttcttttgtcttttttaattactatccttcttagcattttatgtcgattctatcgaagataattgtccaagtaaaaaaagtagaactactgaaaaatcagggttctactttttctattcttatataaatttagtgatgcaataatttaattaaaccaataacagctaatcctgcaacagctgtgccaactaagcacaacactttttgtcttcgtgcgcctactttgggtaaaactactacatcattattatcgctataatcataattctccatttgtttttaccgcacaataatagatctatcattctttttcatcgttagggtccgcatttttctctaaatatacggttttctctaaaatagtaaacacatacttaggtgttttagaatatttatcatccataatttcgattgatgaaatatgcccttttttgtaatttaccttatttcctttttgtttaacatactttaccaaaggcttaacggcttggacataggtatcaaaaatattagcatccaatttaactgccctaccatctttagcaaaagtgattttcgttacttcgtaaacttttccttccctcatttgttacctttcattgctccataacaattttcagttttgacaacttaagtatgtatcccctttgcaaaaaagtccttgttattccattttgatagtttctcctagtagcaaatgtagattacagcactaattaccacaacataagccagcatcattgaaactaagctcgctttaccttttaaaaacattgtaccaattccaaatccagttgctacaatcaaagaaataactaaaaaaatcagcattaacttattcctccctattttgcttggattaagcataatttaaagtttttttgagtaaaatgctgattctttctagttctaagaaaatacgcaaaaagaaatagcgtccattgctgaacgctatttctttttagaaaaatttttaattaaataatttaacacgtctcttccgaggcatgaatagctcgaatatgattaaagcattactcatgttatcaaagaattaccattttgtcaatgctcaaatcccttgagccagctgaagttacaattactaacctactcatttttttgctctagtatcacaaataacaagccaatatttaataggttagatattgaaaaaactgcattagagaattggaatacgtctttgattggatcaaaaccaagtatttgcttgatagatattccgaagacccctgcaactagataacaaactaatgtgaggcttataactgatatgtctgccattacataatttgttaccatctttttgaaatttgccttttgtgttgcaaacaataaataacatccagtaattaatagcattactgacaggagtcccaatgtaattctagttatattaaacattactggcaaaacattttttgataatagatctacaaacattttttacctcttattttctaaaatttagctttctgtttttagtaagactaagaaatagtgaatcattaataggttcatcgtgaagaacgtgaatccgcattgcttgtttacaaatcttttctattacagcaggagataagccatctgttgcttttattacgacagtacttggctcataatcaacttgccagcgttgcatgaagtacgtgatgaacttactacgatcaatactttcacttggataacgtagaactaaatcaaaccttcgtttaattgcaggatctataattgaatccagattagttgcaccaatgatataactacttgtatttagattatccatccctttaaggattgtgttgacaatttcgttgtattcacggtcagccccttgtgaagctaatgttcttcttgaaactagcgcatcaaactcatcaaaaaagtaaactcctggtttgcctgggatttcttcttcaaaaaaatacgttatcatgttacctgtctgccccatttgactactaattaacctagcaaagttaatctctttaagtggcaagcttaattcactcgctaacaccttcgcagtcagtgttttcccagtaccaggtttgcctagcaacaagattgtattagtataagtcaatccatacttagctaagacatccctcttctgtcgttctaagacaacttctcgcagttgatctttcaattctttaggaagaatcaaatcatcaaagcttaagctaggcttttcatacttaattaatccctcatgagtttcattattaacctgcacatcattgagccagtccataatttgtttagcttcgtaggaatgttttctctttttaagattattagcaatgcttattgctacttgccgaaaatggtctttatcgccgtatattgaatcctgaataagatccattgcttgtttagtcgttggcatagacttattgtatttcctttcatttttgctgttgcaactatcatagctaaattgaaaagcaatttctggttttctctaattgattaattattttcaagtactagtattttgaatagttggtatttaaaaaggcattccgtaaagggatgcctttattgttgtttttgaatttattattgattttcattgtgtttaaaaaaggaaactacaaatatgcctaataagctgattaaaccaatgaatttcattcccccacttattagggtaagcgattgtgtaacaggtatatcgttgattgctttaaccagcatgtccaagataatacttgctatcgtgcaaattaaccaaatactaattgcaattttgcattgcataatgtacttcttatctattttgtttaatgtaagtatgctatatatcttacgagccatcataatgcaaatagctattgctactgtcataaacaaagctaaagtaatgttaatcatcgtctagttcctttcatctattctttgtatcgctaattagtagcttatcattttcacagtgccatttctgtttttttgagaaattctgcaactgcttttggaatctcttatactaatggaaaaatcagaaaggatttaggcaatgactaattttatcactcgcttgttccaacaagttaaaggcaaaggcagacctgcatctttagaatatgatagctacccttttcccaccttgtgcttaggcatttcaaaaaagtctgaggaagtaaatcaaccgattaagatttatctccctaatattcggactaaacgtgctagacaaaatcaagttatctttgctaatgtccccagcgaaaccgaaacacgcttgttgcgcaaatttatcaagcaagatattaagtatcaagaatactttcattctaattattatcttttaactcacaaacaggaatggaacaacaagattgggtttcaaaccaactttattagtggtgtaaccgtaattagtcccgatcacagtatgactatgcagacttatcgtgattcgattgaagcaggtgtacctgagagggatgtacatattttcaatcccactaaaaaaggtacgcctacccttgatgttatgagtctgcctactaatgaaattgtagacttcttagcaggtctttttaaagacaagagtagtttacgccacgactggcttacctatcttgtagggctagaaaaagcgtatgcagaattagataaacgttcccctaattttactgatttattggagtttttccgcaatcctgcttcaattatggatatttgccattatgttgaagataacctagataagatcaacaaaagtaagtatcagaaagtaattgacgatttaaagagtcattttcatttaggtgacgctaagcagaacgacgttaactttgaaatatacgatgtgctattccattatcaagatgaatccaaattaggcagatacctgtttaatgaaaatattaatttgattaagcttaattcaattattaagcatggcggtatttgcatctttgaattagcttctagcgagttaggcattaaagacgctaaactctggtctaacctaatcagcatggcacttcagtccactttaacaaagcgcagaagtggagaagcaactcaattgccaatttatttatgcaactttgacaactatttatccgattcatggattaacttaattaaatcagcaactaattacaactctaacattacacttaatattgcatccctcgatcaaatgaaagatcctgacagtatcgaccatttacttcattactttcctgtcaggactatctacggtgacatgaagcctgtatcagaagattttgttagaaagtacgttaaatatttcattaccaacgatcagtttgatattaagtcgctaaggcgaatcattacaactttgccaattaatacagcttttactcgtttaaataatgatgaattttgtctaatccatccagtaaatcaatagcagaaacatagtcttttgcgtctaactaggagtttttaagtaattggcatcttagttcgttatactaaaaataggaattaagaacacgaggcaggtattatgacatactatcaagctcttagaagcaagtactacattacgtttgataaaaagtacaaaatattgcaagaaatcagatatagcgattaccagtttgaatctaggtttacagtcacgtctcgttatagtcaaaaacaacacattagtgagtggcttagttcaaaccctaatgatggtattgaatttgtcaatacacttttagaacagtttgattttttgcaaaacaatcaagaaatctttcccattgtagaagttacttacaagttcagaaagcatcgtgtcttatgtagtagctatgttcttaacaacaaagttgaagtcaagctctacgatcaaattgaaattgcaatcgtcaactatgaacatgctttgcaacgcagagatcatttactgctctctactggtgaaaactccctatctgttccaacatccaatattcttgcaatcttagaaaattaaaaggcatccctttgatggataatttcatttgaaagggatgcctttttggttgataattttgcagaatcggcttctgtaatttgatagaataatactgtaaagaaagttaaataagcggtggtacttttattttcggaggtggtgccaatggtgtattaactattgtgtcgaaatcttttgaaaggaggtacagtttgtttcatgacaggctttcttctgtctgtcattgctgttatcaatttgctttgtatcttagttgcaagtatgaccttgcttaccaagaaactgacaaagtggctaaaagccgtgaaaaagatgatgacagcgttccacgacttgtggaaaaagtagggcaaacaaaaaagccgtgataactttggctaggttgaatcggcttttttagtttcatttaactattgccaccgcccttttagcggctctgtacataagggaagcagtgcaatgcttctctttttttgtttacaattgtattttaactcattttgagtttcagttcaattttgcttctttgtttttaatacttgtttgcattttctttcgtatgtttcgcaactttttatgtttttgctttttaatattttcatctgtttggagcaaacagcatctgttcattttttcagcgtatatttaaattaacaactaaatattcgataagcaggtgatttttatgacagaaaaagcaaataaattctatgctgttaagcgtggacgtattgtaggtgtctatcgctcatgggaagaatgcaaaagtcaaattgaagacttccctcaccctatattcaaaagttttgaaaatgttacagacgctctcgcctacctagattgggacaaaaaagataagatgaaatttattaacagtggacgcaaaggttattataaggaccgtcctggtggtaaaggtagcatgagtttacaagaagcaatttcttctattacccaaaacgcaaaaaagccatcttgactagattgtcaaaatggcttttttctattttaagcttttaagatttaatgatttccaatttgaatttttaatatctaacatccttagatttttaataaactgatccatttcttcaatacttaaatcttctactagaacgtttccttgattgtcaattaaagtatctcgttctgattcagagatggactcactgtcgtctacatcatgtttttgccaaactgaatccaaatcaagataatcagtaacggatttaacattttggagttccttatctgtaacatcttcaatgtcactggaataagttaatactcttttccactcaatgctaagatgcaagccattcttttttaattcattgattttcatattttttctaccttctactccatttgctattatttcgctaaagccttacttttgtaagcgtatgtcattctccagttaccagcgccgtacccgattctcagtgttggaacttttttgccacgatgaatcttttgagttggcaagaagtaagtaccattacctgcccctgctaaccaaccatctgcattaaatccagtagttccatttttatggattgttttagcctgtaaccatttagcgctaattttctttgatacccgataatgttttttttcgtcagctttaattaatttagcagacattttattaaattcttttgctggtagaatcctgtaaagttttttgccacgaaaggtatgagctgtaataaccaatttcttgatcttatcattttctttgaaataccaggtaccacgagtttgcttaggtgtgatatatggtactttagtaccccaggaatttgcttgtacctttgaagctcgcatccctgttaaacctaatcccattagaatagttaacgaaataactaccattttcttgcttttttgcatgatgaatcccctcaatcttttgttgaattactaatgttaagagtaatattatcatgtcaaaatgggcttttcagattttctctatttttaaacaggaccatatttttcgtctttttaggagaaaaactcggtcttgacaaaaatatccttgactatgtttcaatttcaaataccctaccgcccatcgttagatggatggcagggtatcatcttttttctcatttaaactcatcattcaacaagagttaggtggttgtcacctgcgccacaaatagggcaatgaggattgtcttctgcttttaatagatcgaaaaaatcaatattaacggtattattgcagttgtcgcaatcgaatagcattgaatcttgcccgtgcttagttatcttcttaatatctaacatgattttcctttctttttttcaatgacatatgcttattttcgcttagaaatccttctcgacttcataatgagctaattgcttgtacttgtaaccacccgtttcatctatactcatcgtgtatattgaattacgcacttcatcttcaacatacattactttttgcctaggtattttaaaggcttgaaaaattgcaataaatccttgttgtcgttcaagataatttgtattgactgtacattgctttacatccgtaattgagtcaatttgaggaagattttcgaatactccgtcataccatgaagcctgctttgcaattaattcctgtttatatttgtttaacagcttttctaatccctcaacagttagatagtctttccatgcaattccattatctacgaatttcttaggttcttttccgctattcacaagatgttcgtaatgaaaaatcatatttttatcgtcattaccaacttcttcccacgtaataaggttatcaaataagattgatacggctatttcacgttgttgaattgcttggtactcgtaactatccatatcaatatttttcaatcgtaagtcacgcttttttaccagaacatcatatagcatttttcttagcttgttcttgcctaattcagttagatattgtttcattttgtaccccttaattagtcaattatttgtcagttcaacatgatattacatagatggtattttcgcaacgttgatgtttcttctgatttttaaccctcactcaaggtttcagcaattttttccaattgttgttcctttttcctaaaaatatgttcaacaattagtccgctccaaaaaaaaacattgcagaaaatcgttgctgtaaagtcaaaattaattccatagaggtgaatagtgaataaccagtagatcattccaaatatgccaactaaagctaaaaagaagccataataatagccaagaacgtagcctcgttgcttgctttgatcctcttcacttttaaaggtcttccaattttttgtctcaaacatagatttttcctagtttcttttttagtttcttagtcaatttatcaggattacccttcttagcatctatgagtagcaagtacaagtaataccatgaaagcaaccccttgttactgtgtagtgcatctactatttcagtgattaattgatctaatctatcgtactgaacaagacagatccagtgcaagattttctctttgcgcaagtaagctttttcagtttgaaatttaggctctggatcagttaatactgaattcaaattatcatcttctagcccattaattattttgaatttcatttttagctccatgttagaaaatattaggtcaatgatgtcatttctattcatttgaaacaacttacctaagaacgcatttgctttgatgttcaatatccactgaaaaccttttaaagcactccttaatctttgatgattatgaaactatgggacaattttctatcagcttcaactttgcagggcaaatgccaactattttctttgttaagtgagcttaaattaaggcagtccatttaacaggacgtaacactacgtccgctatcccgttgacaaagcttgtcttcgggaatacttttctgattatttgcatggcaccattaatatccgcattaataagcgtgccattatttgtcttgaacaagccccgtttaattctgcgattgacggggcttttgccttgtctttgacggctcttattgccgttattccagcatggtgtttcattatccaaagcactagtctgactagtgtaagattcattagttctaatcacgctaatgccagccagattagccttgtattgaatcatgtcaatcatgaccttatggggaatgccaatgaagttttgattgttctttttacccatgtcacttgatcttttccatgacttattattgccaatgacgatagtgtttgccccacagcttagcgcataatcaacgatgcgcttggatgctttgtgagcaaactgcctgattttgtcattcctccaagcagtaattctcttcatggcttttgtttcctgataaacgggcttaaggctttgcttggtattaattatggtttctaattgatgatattgtgcctgtagtttcttaagtctggctctttccttgttgtagtactgattgaccgatttaagattgcgaccattgattaatagtggcatactttcagtgtttgaaacacaggcaaaagcattatctactcctggatcaatgccaatatatctgccattatcaggaaggtaatcgatcttatggtcaatcttgtactgcacgattagcttgtagccattataaataggcttaaaagcaaccctttgaacctgtttgatttgcggagccaatttaacttttatctttagcttaggtattgtcagatagccgtcttttactttggcattttgattggtcacaaagaaggtatgcctttgcttttttcttaaatatttgggtatcctcggcttgcccgtaaacttgccaggattcttctggtaggctttattggccttgaaccaggcttgccagacagtattgacttcttttaaggtctgctgggctgattgaacataggctaattcatgatagagcatggactcacgagcttgatatctctttttaaacatggaatccagctcgttatagcctttgacatattgcttatggaatagaccttggcgcaagtcgtacaaagcacggttgtatagatcatgagctttgtaactaattttatccaaaatattactagcgggaatgatgtattcactgcaaagatgagtatattgggtagaatttctaggcacatttttagtctttttggtcatagtttcacctccttaaatagtttcgaacttaatcttttttatgtagagcatctcagatcagtttgcgctctgttctgcgatgcgaatactcacgcattgaaaagcagtgaagcagactgataatttcttcaaacaattcctgttcatccgtcttaggattcgcttcatcagaaacaacttcaattttagtattgtagttcttaaacaaatattcgaacagttcaaaaccaactctgcttaaacgatcttgatgagtaattaccactctttctacttttccatcaataatcagattaagcattttaaagaattgtttgcgatccttaaaagaaataccgctggcaatatcttgataagatccattgatttcatagcctttggcaagacaaaagtctttcagctcttgcatttgattggctaagtctttcttttgcttatacgttgatacccggccatagattactgtcagtcgcttagagcgaccattttttaagaaaaagaccgaatcatcgcctagaaactttagagctagatcagttggaaaaatatccagctgataaccttgcaaatcatttttcttatcaaaagtcatatcaactaaatcattagcataaaatgctgattttattgggttatctttaaaatcaataggtgaatcaaaataatcttcaccgcaaaagataattggatgtttatgataagtcagacgaatatctaaatgtactgctaattcagctaaaatatcttggttatgcttaaagtttagtgcttgcttttgcttgtctgttaatggatacaaaatagacttgtcgtctttaggattacacaataacaaacgatcgtaagttaagttatagtaatgcatttttaatcttctttcttaatcatttacctgataggtttttcttgcttatagtttacaaaatgcaagtaaagttcttatggttcactcagaaacaagcttttttcagtttcaagtttttctgtattttggctaaaaaagtatatattcttaattagctaagaataagtcatgtggtaataagtcaaatgaaaggcgatgatatttgttctttttgatcataaatttgagtatatgaaactaagccttggtaaaggttgatttttttaatgttaaacttttgtttacttttaaatttagaccaatttttgaaattaagacctcggtgtcctgtacagtttgtcatctttgagcaatttaaagataactcgtactaattttcttgcagttaatgtgcaagcacgtttatgcggcgagtagacagcttcatcatacttcttttggtaatattttttgaaaacaggatcatgtaatcttgctagattggcagcttcaatcaagtaatatcttagatatctgtttccagtcctggccattggagtatgttcgttgctgtgatctcccgattgatattgattccaggttaggccggcatacttagccagctgttcttctttatcaaagcgatcgatacttccgatctcagcgataataccagctgtataggttttgccaataccgggaattgattccagaattttgctttctggtaatgcatcaacgatacgatcaattgctttttctagatctttaatagattcattaaagctttgaatcatgttgtaatgaacagaaagcactgcatcaattgaatcagtcattactttgcctaagcgatatgaacctctaacagctttcttaattgctttagccaaggtatctggatcggaaaagcgtcctctgcctttaacctgtaagtaagaaattaagtcttcggtaggcatatccgcgatctcatccagagttttactatcggttacaatagacatcattgtagcaccgaaaagaggagtattaatcttatctttatcgacagtgattagtttattaacccgataatataaagcttcaatgaagtgctgtttggtacgagtcagttcttgaactaattcatatctggtacgcgttaaacgctctaaagcaagatagttgtcttgtctggcaatgcttactcgataatgtccaaagcttagatacaaagcaatgtaataagcatcgagaggatcagttttactttcttcaaagactttatgaaacctgctggtttctttggggttaattacatcagtctctacattgagcttttgtaaatcttcgtcattttggaaaaagtaagcaggatgaaaactgtaaatagatgtagcttccatgccaataatgatttgatcatagtgtttattttgagctagatctaaaatttgttttttcagttcactagcaccataaagatcattgacaaagctatcgttaattaagcgtttgttttgatcttctgaatcaagtgcaacgacctgtaaatctttagaactaacatcaataccgacaaataatttcattggaaatggcctcctttctttcaaatttctgatcatagattttgatcttcacatgttaacccctaattacagttcttaagttcaatctcgccagtataagtattcactggttgcttctttgaaagctgcacctaatcccaattgctcaaggactagcaaaaagaagcaatcaatacagcatgtgagttagagcataaaggaactgcctgggtggcagacttataaagcagacaaaactgcaggaggtgataacctagaccagttgaccaaagccaatgacaattagaggctaacatgcgaagatcaaaaagcaaatactaatttgattaattatcacaatatgactaattacaatttatataatacgaggagttgaaactatgctaaaaaagttattgaatctatttcattctaaaaaggataagaaaaaagaaagccatgctcataattataaagcagtagatcctacacaaaaagttaacaaactagatactaaagttgattcggattttactgatgaagaagtctttatcggggatgcaggcaacgaagacgaaaataaaattattaaggatcgtacaatcccgaaagtactgttagaaaaagaccctgccatacgtaagacatggctagagactattgttgcacatgatcttaagacatttcatagtcaacctaagccagataaggagcatccacaaggagttattatcctttcacccaataaagtgttgctaaataatttattagatcaagcattgcatgtaggtattgaccgcagtcagattcatctaatcttccctgagtttgaaaatacttgtggtattgatctttgggacgcacctgtcgatcaagtagctcatcgtttacgcaagctttttcaatttaaagattgggctgaaatttcaattctgaataactactgtaccctttactgtttagttagtgatttaaaaaaacagaaaacgtcaatgaatggctttttgcattttttacgcaaagaaaaacttgttgctaatgcagtaaaagacgttaagtttaattttatcaattgtgactctctagcagaaatggatcatctaacaatcttattaaatggtgaaaagtccctccatgtagtagatgataatgtgcgccaaaacacttacgatcgcctttcacaactgattatttggtttgagactatgctacattcttatgaaaatcacaaagaagataccatgcaaaccagtttggcttataaggttattaaactgaaaattgaaagcaccaaaatcaagctcaagtcctgtcactattgagctttcttagacgtaattagtttttatatgatctgtttcagtgcaatttgtatgaatcgtggcagttggttaataaagtcattgattacttcatctatcttttcaaaactattctgtttaagctcttttaattctgaaattaagtagaccaatgcatctacgaatctaatatcaggtaaggattcgttcattagatagaataaatctccgattgtcttatcatctgtattttgtctttcctgccaggtcaatagatcataagttattgctgtaactgcgatatagccacattggccatcatagctttgaacttgagatttatctaaagcaagatattgcttagacgtcttaaaatatgtttcaatttgccatctacgaccataaagttggatgatttcttcagggctaagctttgtctgagtagtagctaaaaccaaatacttgttcttgtttccacggttggagacaaagacgagctttaataaaaagctatgtccatgatattgagcctcaactatgcttgaataaagataatgtttctttttacggatgtttgaagcagccaaacgatcatacaagtctttaacgctatagcggcgatggcgataaatgtaataaatctttgaactcttcttgatcatgccaagtccatctaaaccgatcttctttaaaatccaaaacattcttggagaagaaaaccaagaatcgaataagacgtatttagcttctactcctaatcgtaaggcttgtctaatcaactctacagttacatcattcatctttctctgagcttgatttctccttttaccagaaattgaacgttcatcagcagtaatgggagcagctccaatcatatttttcttggttttggttgacatcaaggcaaagttaaccggcaagaaggtattgccatcgctccagcctaaagttaaaccacgatatccgttcaaatactcatgcttgtcatggtcatagactttagctagcaattcggtctttttagaaaaagaccgagccatcagcgtatcgtcaacgataaaagcaagtcggcgtcttttatcgataaatggttttaagcagccaatgagccgggctgcaatcaagcataatagtttttgccagttgattcttccatcgttaagtacattgcgagcagttctaacggaaaaacgtttgtcatccttagctctgaataaagaaagccgagcaaaatgtactgacatcagccaagagataatcatggttaatgaaacggtggatttacgcttaaaattgacttgtttagttaacttagctagaccaattagattaataaatgaagaaattaaggatttagtatcattttctgtgtcgatttgttctatactgttcattgcgcaggatctcctttactttttaggtcgacacttaaagtataacgcagagagagcctgcgtttttatttttgataagaaaaagccaagaggcgcggggaaggagcgttaatcttagctttcaagtttcagttattaaagttattaactcaattcaacgagttgtggccaaaccattttttaaaaatttatttttaaatgaaaatagtatcagctttcttcaactgcttagtcctactgaaaaaacaggtattgttttaattcatctacccgattctgccctttatttaggagaaatccttgttagcacgatcttaagagatcgccacggctatgaagttaagaattctaatttaacatttccactcttgccactttatttaagtagttgggataaatatgcgtcccctgaacagcttgtttggctaagtgaaatgggacaggaaatttcactaactgcctcggcaaaagcaaaatttaagctgtctgaacatatcgccaatccattgattgatatactttgttatattgataagcaaggcttgaatggcaataaggtagaaactgattatccattgctaatcaagtctactaaagttacaccaaataacaaatgattcaaaaggctacaaatgatagccttttttgttttggaaaacttctcatggagcatttttggcaaaataggatttttcaaaaattcacttcatttttcggtatgatttttataaatgaagtaaagggtgtgacgttttttggataattatgatgataaagactttgaagaaaacgaggatgaaataatgccacaaaccaggttaggaagaaatcacagaaaacagggtttctggcattattttggtcgtttcttatcttggtgctttctagttttgggtttgctttttgtcagtggcgtaggcgtatttgcctactatgctaaaagtgcccctacggtcaccactactaagttgcaagcaggcggttcttctgctctttataccaatgacggtaaatttctgttatcacttggttctgataagcgaaactatatccgtagcgaccaaattccgcaacagttaaaagacgcagtactatctatagaagacaagcgtttttacaatgagccattaggggttgatccaattagaattgctggctcgctcgttgccaacattaaaggtcatgatatcagcgcaggaggatcaggaattacccaacagttgattaaactatcagtattttcaacagacgcttcacagcggaacattcgcaggaaagctcaagaagcttggctggctatgcaaattactcaaaaatattctaaagagaaaatcttagagtattacattaataagccttatatgggttacaacaattacggtattgggacggcatctaattattattatggcaagcatattaaccaattagatctctctcaaaccgcaatgcttgcagggatgttaaatgcaccaactagttatgatccatatctttatcccgaagcaaccaaaaatagacgtgatactgttttatatgcaatgtaccgcaataataagattgataaacaaacaatgaatcgggcaatggcagaaccaattaattacggattacgccctcgtcacactaataacgaccactctcagagaagaataattgatgatccatacattaaagaagtagttaatgaagctaaggctaaaggcttcgatccatataactctaatctaaaaattacggttaatattgaccagaaagcacaaaatgaactttacgaattggctaacagtaataaggtcccatttactaatgaaaaaatgcaagttggagcaactgtggttgatccttctaatggacacgtagttgcgattattggtggccgtcacctgccaaaagtagcattaggctataaccgcgcagtacaaactggacgctccactggatcttctattaagccaatcctagattatgcgcctgctattgaatataagaactggtcaactgctgagatcttatatgatacgccttatgtctactctggaaccaacgtacaattatatgattgggacaatacttatcaaggtgcaatgactatgcgctatgccctagaacaatcaagaaacgtccctgccgttcgtactttacagacagttggactacagaaggcttccaaatttgcaaaacaaatgggaattaatattgaaaaaagtcaaggtctctcggtaggtatcgaggccaatgcttctaccttgcagatggcaggtgcttatggtgccttagcaaatcaaggtgtttatcatgcgccccactttatctctaagattgaaacccccgatggtttagagcatctctatgataatgctggtgaaagagttatgaagacctcaactgcctatatgattaccgatatgctcaaaggtgttattagtaaaggatctggtaccaaagcacaaattcctaggctttatcaagcaggtaaaacaggtacggttaaatattccgacagcgaacttaaaaaatttcctagctatgcaggaactccaaaagattcttggtttgtcgggtatactaaggattattctattgcggtttggactggctacgataacctcagagacggcaaaatttctggtaatggtgagaactccgcccaactcttctacaaatcagcaatgcaataccttatgaaagacaaggttaattccgattggcaaaaacccgatactgtcgtagcacaaaagttggtttctggtcgggcaataactaacgaattgtacgtcaaaggtcatactcccaaacctcctaaaatacctaagaagaaaaagaatgatactcgtaggatcatcatggggagaaatcaagataatcagaatgaacaaaaaactcagtcacagcaaggcactttgcagaaacactacattgttagacgtgacgcttacggtaacttgcattactactattactacacaaggtaaccaaaaaagatctggcaattatgctagatctttttattttgcctcattttagcgtgcctagagaatttaatctgtttttgtggaattatccctataattacagaaaaagtatctaaggagaaccatatgagtattcaaagagttattttagctgatttttatcagcaaccacctaaatattatcacgcaacattcgatcacttatcccatactaaggctgtttacggcaaaaccatcccagtagctctattaaaaaatatctatctagttgattccgaggataatcgcttagcaaatatccgtgaagatacttacattgaccaagatggcaacccaattattgccgatcattgttgggttcagcttaatcaggcatggttcaacctcccccacgaattactccaaggggatgaaatctattttaaagcagatgttgaacaatacaatattactagggatgatttagctaaaaagcgtaaattgatctgggaaaaagcgaagcaactaaatgatggtatttactctgcttggcaaggatctaagcacatgtatcacggagtacagtatcaaagtgcttatgagcaaatgcgttcacacattcagtcaaacaatgaaatggcaagattgcaacaacaaaacattccaatggttgattatactttaactgacttatctgatattcaagttattaagtacttaaatcatactgaacgaagaatcaaatataactataaacaatatctcaagcaacacttaaaatacagtggttggttagttgctcgcagtacatcgtttacacaaactgggcgagtcttctgattgtcgatcagtgctggttgatctttttcgactagtttaatagcatatatgtagaaaagtggatgggttgtaatcttttagttttatgagtttgctggatgaaaacctaccttattcgatgcctaactatgctataatttaattatcatttaggattcgatagcactggcttctaagtcataatctaagataagtattaaagaatgcctatcttagatatatgtcttttctttatggtaataacctgttcaattgctcaaagctcttttctattcatcttagatgtatgtcaaaatcaccaatgctaaagagtgtagttctttttgtgtgtaatcaagttatcttaatcatgaaacatgtcatttggatcaagattgctcattgcatcaaaaccaaagcgatcatcatagcctacttgcttatctagctgatattcagctctcactgagccttttaaatgacttaaacttgagagtccttttttgcggtaacgatttagtttcatctcataagcacatggatagtacaatttggcaagccaatcatttttacggtcataatcactgattagtttaccgttgagagctttccaattacctccagtttcacgcacatgctcgtcagcaattattaccccacaatcagtaataatagtcgtgcctaagccataagaagtccttcctttactttgataaggctgaatgtagcttacccctctaatgcattcaccttgcgcaatttcttgatatttacttggaccaaaatatttgattctactaattggtagccacatgtgataatccatgaagcctttatagttgttacgagtaaaagctagatagaattcagaggatgcaggatcaatttgcaccaccttatctagtagtaaatatccctgtaaatgatcgtgcttatcttttctgattgctaaattagagactagtgcctgccaatacactggctgatatttgtttgctaatggagccaaacgatcacgattgctttcatcttcatgcttactccaattaatcgaaactggtgcggtactattacgaatttcatttagagcatcatctaattgtatttcggggtgagtagttagttgcttacgctctacaaatggcatttgccaaaaatcttccttagctatcatgttaagcatatgccacatagccgccgcttttggttcttgttcaacttgttcaagcattttatgcttattagaccatgccctattatgacgtacatgcttgagctttttgatttttgcttttttcatatttaaacctctttgttttcaaatttgtgctgacacaatcattattaaatagttttgtattctactatcattttctctgaaatagagaaaattaaagcttgctattttatgcaataagagcaaacagctaggagaaagaacttagaataccgcttgatgggtgggcgtgctaattactctcgtgcctaatgttgtaaagattttagtgagggttttatcggtttcagaagaatgcccccaaatttcaataatctctttattattagatctgtaaactttaatttattttaaaaagaggtatttcatatgaaatttaagccaagaaataaaaaggttttagttcgttcaactgccgctttgggtgctttactcatttgtggtggcgctattaccagttcacctttggttatgcacgctgatgacactacatcaacccataccgcaaccgttgctcctactggtacaactcttgataacactaagtggactgctgttgacaaggctaagacgatcactcgaacaattcactatattgatgaagacggcaaaaccgttgccccagatgtagttgaaactcacactggtgaagtatttactactaagaatggcgatcaaaccgtaaatcgtgcgtttactattgttaatggcgttgctaccaatgtagttcctaagtttgcatcagttgtatcaccatctgttcgtggttataagcttaagagtactcaatactcaactatccctgaacaaggttggtcacttgatggcactcaaaccaaggaccctaagactggtttctactcaaacctttctcaagatgaagtaatcaacgttgtttatactaaggaccctacaactgctcttaaggatgaagttcctgtcccaggttatacagttcttaatgtgaagaacatgactcgtactattaactacgttgacgaagaaggcaataagcttgctgattctgctgttgaaactgttaagtacgaaactgttgcttccgataagttaactccaaaggagcaacaagacgaaaagaaccaaaaggttgctgttgttcaagtccttagagatactaatggcaatgtcacctcagagaacacttcaattttgtctactcctgcttacaaacttaaagatgtcaagtcacctaagattgcaggcatgaagttgcaaaacaaaaaatttgctactcttactggtcaatacatgtggttaagcgatcaaccatacgtacacgcaactcttgacaatggcttgccacaatacatgactcaagatgaaattgtagatgttatctatgtcaaagcagacgctaagaatactcaaaaagataagaacaccaagcaaaataagaagaacaagaacgccgttgcaggtgtagtagacaagaagaacaacggtggctctagttcagacgcaaattgcgatggcaaagattctggttcagcttcaactggttctagttcaaatgcaggctcaggtgatgtgggcggttctggctctgcagacgtaggttctggtgatatcggtggttctggctcaagtgcaaccttacctcaaactggtaacaagaaatcatcatcagttcttttaggttctggtgttgctttaatgcttagctcagtcgctatggcttgggatggcttaaagagaaagttccttcactaatctttgaaacttgcaccaatactatatcagctatactccatcggcttaaaaaaggtattaaaaaaggatgtgcataattagcatatcctttttttgcgtattattcgtcatttttaccgaaccattatccaagatattctctagtctttcttgtgactattacgtccttgtatggcagtactgatggaagataagtagctaagcaaagaattaattcagtcaagctatcacagctaaaattcagatcatcaatgttttcacgttgtttgtctggccatgacacataactagaaacagtgtaacgtttaggaaaaagttgagaataatcatgagtctcatcaattcttggctttgcaatacctttatcactgatttgccaagtaccgttagctacttgatcgtgagtttctgttgaaaaatagacacctttttgtcgataaagctctattacctgtaaggctatattaagtctattctttttagcaatttcctcaaaaaattgtgcaattccttttcttttgtctaataatgcttgctcaagtaattcagaactaacatcgtctttttccaataatagtaatgcttctctgagatttaaatcagaaattctagtttttttgttcatatgttttgtttgtttcaaaattttttctaaagtatcttctttattcatttttatttctttcgttacattcgtgaactttactacttatttaatcgttagaaaacaatttatttctagcataaaactgatagatttcaataatacgtttgacagctttgattaatttcatatcactagtctcgttcagttcaacctgtaaattcagtttatctgcctcattatcttggcagtaaatgtcaacttcaaatacattaggttctgctttaaaaataatggataagtagctgttatttgcattaattgaatattggttgattttaaattcatccgatagcgtattctttaattcatctgtcattctatcaagtattttcatagttgttttcccttttcttcgttatattcgcaagttttatcattcaacatgttaattttttgccaattcaccaagcatcttttcatattcatctctagcccatttattatacataccaatgtaatcttcacctggtgtatttaaacggacattatttttaatcaaaacatagccaatcatcaatcttttagtgctaggtaaaggaatataagtatgatctccaaggatttctaaacctttaggattggtcagcttatagtcctgtttagaaaatccatgtcctttatgatattttttcgcacgagctacaaatttaagctcttcaccatgtctcaattcacctaatttacgaaagtcggaagtgtaattaaaccacatgtgatcggcaataatattttcatcttcatcttggatgttggctaaacaaatggtaggagtcatctctccgtttgtatgtctaaaaccacaactactatattgagccgtatattgcttattgcctgcctttgcaattaaatcatgtttcaattcttttctcatcattcatcatccctttcactttccaaagctttagcaatttccgctaatgccaatggatcagtaattaaaatttttctcatagctttgtcaactggtttatcgccagggagtttctgcttaacaattgttttaatagcttgtattgataaattgggtctgtcacctagtatttggctttcatagcgcttatcagccattttagctaagttgctgataacttcccactttcctgttttaaagcgctgagggttctgttttagtccaatcagtgtccttttaggtacttttaccatttctgacatctgatcccatgtaattccgtttttaacgtgattattaacaaatctttctgctttatcagcatcagaaccacgttctgctctccaatttttttcagtcatgttgcttccttttaattgaaaattctaataacttttgtaggtttattataattcagaatgaattatttgtctatattatattatcgtctaagatacaatttgcagtaatctattatattcaaatttataattgtcgctttgcagtcacttaaaatatcattatttttcttttattatgtgttttattatcttttaagataattaaatattgactttatattaaagtgatcgtattatgtatttgtatcaagtatgaatcttgactacaaaagtttaagcattatttttataggaggaaaaacatggactttccattatttgaacaactaagcaatttgactaattcggttattaccaccaagccattaagcttaaacaaaaaaagaattgcatcccatccaagtgcatttaagcgttggttgaagaacaattccgatcaatacatttatgctaaggtctgctctccacagagcgttttagtggagaatagctataaagtcagacgcttatgccttaagatttacttatccgataaaagcacggaagaattaatgcgtattgcattaaaggagaagcgcagagtattgtttactagacctgccgatttggtaatcactgatttcaaaacaaattacgctaaagacagtaacgaaattgagcttactcatgcagatgatttctttttagattgctactacgcatcgcagtatgcagatgaattagaaaataatctgcctaacaatccttacttgaatgacgatgttcaagcacaggcaaactagaaaatatgtatatatcagcaaaaaggactaccagtcgcttggtagtccttttttgggcgtgtttttttaattttcaagaataattatagtctttttgtatctttacgtgtttttccttatgtgtaagaaaaatataccttctgctcttatcaattacttacagaaatgaccaatttagtttatttatccatgaagcatttaaaaaatctaaaaattgctcccatttagtaggtgttaaagtagcatagtattggttctgattattcagtatgctttgaacaacttttggttcattagtcagttcataatttagtgcatcccgtaaattagatatttcatcatcgttgaatgtaccttcatgctctgggtgtagtagaaacttagccaaattattacgttgtttcctaggataggtatttggcagacgaagcagaatgctgtcgtcttcatcttgacgcaaagtcgctcctagaatgcttgcaactacctgttgcaaatttctaaagctctgcttgctaaaagtgattctaatttgttctgctccgtctggactcacagctacaattactacatcttcattcataaactactccttctttgagtgaatttgctgtttttttgtatttaaaaaaattcccggatttaaaattgaagtgcaacactaagtgttaaacaaaaaggccatgaagacctaaacttgaagtgacgaaaaatcaagaaaggaagatcttcatgaccaattcaaattctagcatttctaagcactatcatcaattaaccagcgtacaacgtggacaaattcaagcaatgctggattccggcataacttcccgtactgttatcgctcaagaagtcggctgccataagtcgacaatcagtcgcgaaatcaaacgcggaagcgtcctgcaaagagacagcagctatttattgtatgagcactattacgctgatactgcacagctttattatgagaagcgtcgcaaaaactgctatcagcgcaatccattgaagcattatgctgtctttttgagaatgctctccagacgctttaaagctaaatttgatgccaccagcatcgatgagttcgttggtgaattcaaaaggactatgccaggctacccttgtcccagcacaccaaccgtctatcgctatattgatcagggcttgctggacataagcaatattgatctgcctatgaagctcaaaagacgcaggaacaagcgtcatcacagccatggcggtcacgctttgcacaagaagcatcttggcaattccattgaacagcgtcctaaggaggttgaagacagaaaagctccgctgcactgggaaggagatctggttaaaggcgtcagacgcaagaatcagcctgctttaatgactttgactgaaagaaccacacgctttgaagtagttatcaagattcctgactatcgggcaagcacatgccaaaggctgcttcaaaaggagattgacagacatcctgcctggtttaaatcaatcacgtttgacaatggctctgagtttgcggatatgaccaagatcaagggctgccagatttactttgctcacccatattctccatgggaaaggggcaccaatgagaactgcaatggtcttttgcgtcaattcttccctaagggcaagagcatgaaagacaagtcaaaagcttatgttcaacaggcaactgatgccattaaccacaaatatcgccgaatcctccaatatcacacagcagaggaactcttcaagcaatatatctcttcataacctaactgttgcacttaatttgacaattcaggattttaaaaaatttcttccaagtttttctgaattttttttttatttctgctaatctaaaactataagaaattaacagagaggtgatctaaatgtttgtctttttttggggcttagttggagctggtgcaggtgcctcattaatctatggtttatttgcattgggattaatgttgtacaatccagacctttatcacaccatcgtttcaaccatttggtttataacgataggcagttaccttttgattgaagcatttcttcacttgttggaacaccatgagaaaaaggtacaaagagaacaagaaaaaaacaagtatcataagataatttgaaacttagcaagcacgatgattgattcatcagtgcttttttcgtctaccttttagtttgaaaatcgcacctcgttatctttgcactcatttggatcctctgttggcattttgccaatatcatgtcccatcatcacatgacttagtgcaagcctaatccctatttcttctaaactacccatacaagccagtttgtaagccatataacgcaatacttcgtcatttaaaaacatttgctttaacagtttttctccgaagatcggtccaatggtatcattaggttccaatccattatcaatgccaattcgctcaaacttttgcaggaaacggttgagtgaaattgtagcaacataattgcggaactcaccatcaaatatttctgcggcaatgcttggacgcaaaaaggaacgagttttcactaatctaaagtacaaaagattgccatcaaaagtaaacttgcctactctcctagaataccaaccatctcccagtgctaaccactggtattcaaagtcctctccaggaacaatttgagctttgatagcaatttgtctagcgattttctttcgtttctgtcttcgaatagcatcgtgaagcggtgcaagagccattaagaacttgtctttaagcgtgaagtgatcgacttttatttttatttctttgatttgtttttgtttgttcatttctaatatttacctaaattaccatgagtagacttttatacttagaacttttgtgagcataatcataaaccatgccgtaaaggtctgttactcgattatgaaacttctgatatgcatcttgtgttactttttgcgtatctttattaaaacttttaaggacattttgatattgagcaaacttgcgttgatacattttttgtgaatgagaatcctttggcatcttagcatatgcagaataatagcaatgcaataacaataattccaattccattgctgataaagaatccaaatatcgatacaactcgtcaacagtattactgccacttaaagtgttcatataaccactactttctctttcaaattattgtcaatttcatttttcatggttagattgtattgctttttacctttaattttagttttactccaatctagtatttttctaatttccctcgctttagaaaaaagccaccaaatctcctctagttccttacaattaaaggcatcaaaaagactaaagaggtgaaagtatgacaaataaagaaatgataattgacagttatcacagtagcaaaatgacaatgattgtcacttttctaggaattgtagcaatcgcattatttgatctaatttagtgagggtaaagatgaatcaaaacaatagaataaaggctttgctaaagaaagtaggcttgtcattggtagcaaccgttgctgtaactacagcacttactggttgctctaacaaattaactaagccaaaccaatctcaagcctatcagcaggaatctagcaaagttccgaaagcttctcctgctccacaaaaaggcattggtgggattaccaaggctcaatatcaagagttggccaactcccaatttaagaacggtacgtatggctatattgccgttaacaataacaaatccaccctaaatccaaagagttggaagaccaataaagtgatttatcaaaacttagataaactcaaccgtacatcttcatcaaatactggttttttagaaaagcgtaacttggctaacggttccttgagagtaaggcagtacatcaatccaactggttggcattacaatcacggtggtaatcaaatttataatcgcgggcatctgattgcttattctgtttccgcaggtatcgacaaaaacggtcaatacaatccgcaaaatgaatcaggcgatcaaaataatccccaaaatttgtttactcaaacagcgtattcgaatcaacagcttcaaacaatttacgaaactaaaatacgtaatgctttgaaagccaataaaaaagtaatttatcaagcaacacctgtttttaaaggttccgataaaatggcagtcggtattaacctacaggctgtttctactgataaatcactaaactttaatgtctttatttacaacgtacaacctggatacagatttaatcttgcaaatggtcgggctaaacgtgatttagatatgagagttaaacagcttccgccagctttgcaatctcactatagcaatgatcggcaaaatcaaagcaaaagtaattttaatcgttttagtctcaaacataatctctaccgtcaatacaatgacaagaacaatcacgtagatagccgtgctagacgtgacgctaaagcctttgagtatcaagaattggaagaagccaaaaaattcggtaaaaagcagtggcaaacaggtaaatcatatttgaataaggctcaaaaatggctcaaatccgattatgatcgtcaaaaacaagaaaataatcgtagaaatgaatacggtcgctacaaataacggaattttagacatacaaaaagcattcacacttctgcattgcagtgtgaatgctttttattgttctgtattaattaggcgattgcttttaataattgtatgtatatctttaatagacggtattttggcattgattggggtaaagctatcattcaattcacaaaagtaatcaaagcgaggtctgaattcaaaataaattggagttggaattcctccgaaacgatttttgagcatgcttaaacgaatgacctgactaggttgcatttgagttaaattaattccttcttgaactatttgacccctatctttagattttttagcatcttttagttgtgcttcaaaccattctccaacagttttattgaaaaaactgttgtattcagaaggcgcattcgtaatcttggtatgatcgaaatcatagctcatggtcataatagcttctgctgagtaatcaatatctcctgactccttaaacgcagtcatacctgcatgcaaatcagtatatgaagctcgattgtaagaactaattacaaatactggaatttggaagtctcgtgatattattttcaaatcccagatggcatctgaaactcgttgcttagccgttgattgtgaaagatcatcgctactttgtaaaagctgtaaatagtcaataaatattacaggcttttctccagtacgggaaataaaatttctgatatcttctttgacttgactaacagtaggtttcttggtcatattatctttcaaatgaagatatggcgaaagatcattgtacatttttaacccatttataagggctgtcatgatctgttgtccagatttatttccccaagttaaattccaatgtcctttataaacattgaaaaaattaggcaactgttcaagtggattcgcttctaagacttcattgtaaacttcaccatagccactcaattgaaaagcaaaacgattaactgtcttagcaatcatttgtttagcggacatctcaagtgcgtaataaaaaacatgatgtttagtttgtgccaaataagttgccatttgtaaagccaatgtagttttacctagacctggcgttgcacctagcacataaagctcattattgattccaccacctaaaatagaatccaatttattccatcctgttcgtaaagatggtgcatagccttgaagaatccaatcaaaaaattgttgagcttgattatctggatttagataagtattaataattgctgatttaaaagcattaggatttagttttttactttcttcaagtgtcttttgttccccactgcttgccaagctaactgtataagcgttatatccgttggttcttaaagtactttcaattacatcagagaatctttcagcatcatctctatctaatgcaatcaaaaaagttggattatagtccacagcttttctacgctgctctatatcaaagctttcgagccgttgcttaactgcttccgtgatctcatcaaggttcttaggaacactattattactagtttttttatcttgtacagcttgaatgtcatttaagagcttttgagttacatttgtattttcaacgtctaaattcaaactatgaacagaaatcgcatcgaagatagccttccttttgcctctattatcatgtacatcagatattgcttctgcatcttttgcggtactaactacatagatagctccgtgcggattactcaatcctttattttcaaccattcttttttctcgctccaacttttttaccaagaaggtgattcatcatcagaatttttgatggcatcattatttagctcttgagcatttttttgagtctcaagttcctgctttaatctatctttctgatcttgtaacttttctattgtttctaacaatttttgagcgtaactgcttttcttaaaaagttcactacccacatcaaacttcgataaatccatatttctaatattgatattttcaaagttaggcataggcttttcttgttcaggaagatctaagtcacgactcatatcagaaatttcagtttctaacttaatcagcgattttcttaaattgtcaacccattcttgattagattttatttgttgctcgattaaattatctgaattcggtgcaacctccaagctgtcgtattgagtcttgaacgtaaaataatagcctagaattttttgccttcctctattgcctgtcctacttttaccaatttctttgggattagttataggacatgctttaatatcctcaaataaatgtttttcctccaataaatctattgcttttttaaagactcttgattcgatatacgtaggctttttttgataactctttgggacctgaaatctagcaatcacgtctttcatcgaaagttttttggtgcgtccaatttgtcggtattgacgcaatagtagataaagttgagtagcaacataattttccgttaatgaagctaaatcatatgttagcgttttattataatttctttctaagttcgttaataacggaattactttagtatttaattctattcttaatcttctagttttttgattgtaatcgacttcactaaagaaataaatcttggtccaaacttgaccagtagttagatcaatcgttgtttgcatatcatcaaataaagtttttaaagctttacttaaagacatatgctttgtagatttaaaattaacggctttcataacttcttcaccgtctaagtctaacgtagcttgtttttcttgattggcatcagaaattatgatattaagaagtacttgactgtattgatgtccactttttgcaaaatttggataaacgacatctgtaagttcatttctaaatttagccactgcatatttgttataaggtcgcaaattttcagatactattttagtactatttcgctgtccagacttctcgttcataattaaccctctttttcaccaaaatggtaaaattttccaacctcaaaatactttaaaaaagtattttgaaaggttttaagttaactctacccgtttttgcatgtaaaatcaaggtttccctctatttttattactttatttgtacattgcctattattatactcgtattttgttgtcttttttattatttttctctcattctgttactttaatagttattttcctcctattttgcaattttcaaagttctacttttttgttttacactatattagtcaaaaattatatagtatatttattaaaatattttcctcctgttttgttacctttttgtcaagattttggcaagctgacctcacaaattgttactttaatgcccgattttcctcagtctgagttactttaatgcccgattttcctcctattttgttactttaatgttctgtaacccttgtggctgtaggaatacggagatcctaaaggtcctttaaaggacctttaaaggaagaatgggggatgtaaatttaagaattaccatcccccatttctaagtatgcttcttagtacttctatttttaagcatcaaaaaactggaacattagcgttccagttcgttaaagtttaagcattgagtaaagacatgaagaattactcagtcaactgaaaagttgactcttttattttatcgtatttcacataaaaagactaattgcaaaaataatcgttttaccacatgcatagtgattgccattctactcgacaaattagataattaggtaatagagcattttccctatttttgaaaaaatgacttaatcttctttaaatttgctaaattactaactgttaaaaataaatatagacaaagaagggtattagatgtcgagaaagcaagctaagcataataacgagtacaagaatcctaaagggaaagtttcaacaggtagtttagttaggaccattgctaaacgtacaggggttactcaagtagataccgataaagttataaaagcattaattgcgcaaattcagatggaagttttcgataataacaatcaagtatcactagttaatttgggtaaattttggagaaaagaagtcaagcctaacaacaatgaaatcattaagcgagttaattcaagtaagaaaatgaaacccaagtatgctctcacatttcgaactagtgcaaatattcgtcatgagcttgcgaatagagtaaaaaaagattccgattcaattatttaattatctttaaataatttgagatcaacaagttagttgatctcatttttttgtttttgcaaaaaaagtgtctgggaaaaaactaagtctcagatcatgaaaaaagaacgttgaatttttgtttcaacgctctttttgtatacttttagctccagccttgatattattaaatcatcacaaaataaaaacaaaaaggtggaaactaacatgtacaaaaattatatcacaggtcaaactgctttaacacttaatctagattttgccattccggccaatcatttggctaatgtcatcagctggtttgtagattcaattccagaagatgttttagtaggcaagactgctaaaacgggccgcccagcctatcatccagccatgatgctcaaaatactgctttttgcttactccagaagagttttttctggcagaaagattgagttgatgctggaagaaaatctgccaatgatgatcttggctgaccagcaaaagatttcatatcatactatcaataattttagatcaagcagccatgccaatgaactgattaaaaagagctttatctacttcactaacctgttagaagatgaaggcttaatcaatgaaggtgctgcttttatcgatggtactaagattgaagctgatgctaaccgctatacatttgtctggcgcaaagcggttgaaaagtatcatgaaaagctgaaaggccaggcagttgaactttatgatgaattgattactaaagaagtagtcaaagaaatggaaaaagaaaaagttcaaactagtcaggggctaaaggaattagctcaagaaactgaagcagaaattaacaagctgactaaagagattgagcaggaaaacaaagccattcctggcggttcacctcgaaaagccaagcgacgtggactaaaaaagattctgcaccggctaagaaaagattatgtgccaagaatgcaaaaatatgaagaagccgaagagatctttgccggacgcaacagttattccaaaacagatcatgacgccacctttatgcatatgaaggaagaccacatgaaaaatggtcaattaaagcctggctacaatattcaagcagtcacgaccgatcaatatgtagttgattatgccatctttcctaatccgacagatttcaaaactttggagccggttttggatcaaatgaccgtgttggacaagtttgacaaaatcgtcgccgatgctggctatggcagtgaatacaattattcgatgctggaggaaaaatatccagacaagaagtactttattccctacactatgtatgaaaaagaacagaccaaaaagtataagaatgatccaactaagctaatcaactggtactacaatgaaaaagatgattattacattgatcatcatggcgtcagattcaatttcaaatattacagccagcgcaaggatcgttctactggtcaggtccgtgattttaaggtttatgaggcagacgagttccagctaacgccagaattggaacaattggctaaaacagctagcggccgccagcgccaagttcgctataatcctaactggcaatatttaaaagaaaaagcaaaagaagttctccaaagcgaagaaggcagacacatctatggcatgagaaaatatgatgtagagccagttttcggacatttgaagaacgtatttggcatgcgcagaacgcacctgcgaggtaaagagaaggtcgaaaccgatatcggaattgcctttatgatgatgaatttgaacaaatattgtcaaagaaggtggctgaagggccgatttttattgttaaaaattttaaagagaacaaaaaaacgatcaagattcttaaaaaaggaaatcttgatcgtttttattcatctggaagctagttttttcccagacacttggtttaattttcatactctccgttttctaccctagcccataattcattaatttgttttctaagtccatatccgtagaacattaataagctagcaacgaaaaaaccaaaaaacagattgataatcgttaaaaataataaagtatcagagtatggccaagaataataatctaaacagtgattgcgataaagcacagcacaaccgaaaatgcaactagttaacccttgtactgctaggattgaaaatatgccaaatactgcaataccgattgtaatggctaataggccatagccaatgtccaaccatccagagattttcattattttgactaaccgaatattgttctgatccattaaatcgtaggcttcgtctttattcactttgaccacctgcttgataaaaatgtttccactgtttgtcgatattgtatttgccttgttctgtagtattaccagtccaccagaagacttttactactcctaaaactttattacgtggtacaaaaccgaaatagcgtgagtcatttgaaacacttcgatggtctcccatgacaaaatattgcccttttggaacggttaaagtatcattgttagttttccaatcattttttttagccagctttttgagatcccaattaccgccgctcttattctgttcttttttagagatatagctttgattgattggtcgatcattaacgtagattgtgccttgactactagtaactttatcaccaggcattccgattacacgttttacgtataatttttctgatgctaattcaggatctaccccataagcattaaaaacaattacagatccatgatgaatgggcgctgttttaaaagcccagaccttttcaccattttttaagttaggttccattgatggtccatctactgtagttggcttagccactagttgcgtaaaaccgatagcaatgataataactagtaaaggcatccagacccaactccagatttttttaattgtcccccatggactaccgtatgacatacttaaagcccccttgtttttattttgttcagttgtctttactagcttatctaattggtcttaattatgggacatttcttgattttgctaaaaatgcgttatgaatcgaagaaaaatttttatgttgagctttttacttctaatttagtttttcttacgtatctttcgtcactttttagtgtttgcttaattttggattgtagattttggcctttctgaacataaacgatttctttgctaaaaatcggctatgattattagcaagaaaggacacacggacgtatgaatgaattaaatcgagaaccaagtattaaaatttataatccacaagatcctaaagcggatcctgacccttatgtacaaataattgatgaagacgatgagccatattcaatcgaggactgggtaaagatcgttgctaaagatagtcacggcaaagacattagtgatcgagtcgtgtatgatgcaagtgcagtagacttcactaagtcgggtgattatcctgttgaagtttcagttatggatgataattacaatatggcttctgctgtttttgttattcatatgctgtcacccaaagaggttaaacaagtcgaaagtggtaagccgctaagacgagaatcagaaatagagcgtgaaaaaaaggctttaaagcgtgaaaagtttattgatcgtgcctttggcgttggcttaatcattatcatgatagttttttgtgtttacacttaccttgacgcattttagagaggattgacagtattcatggatatttggttatcactgacattaacgtatttatttttcatcctcttctgcttcttaatctcatggcagtttagctatttaatgcatccccctctggagttgcaaaaatacgcaggacaaagcaagtgggataagtttaagcatttgtattacaaagatactttgaaattgcttggaattggattgccagtagttacgatcctaattgtttggatgaacataattacaatcaactttagctggcggattgctctaacgacattaggttcgattatgcttggcacagtagtcattatcaatcaaaaaacaaaaaacaaataaaagcaccctgtttgtgaatgcagagtgctttttgcttgcctatgctttttgaaagcgatgtttgagcttactgaaaatatttgttttggtctgatgtagctgatgcagttcttttttcagcaagctgttttccatttttagttttttatctttgatataaagttctttgtactcttggtaaagcttgctggaaatagtaactgtctttgctttttcaggttttaattggggtttgattcctttaaccgcatcaactgtttctttagggatgtcaccctttcgagctttgtaagaagcttttacatcatagtaaaggcttgccagctcttcgtctgtcagtttaactactgctatgccattttttccgttaatggtgactaaagtcttttttaaatctggttgatattgtagagcaattggactgattcgttttttggtcataaaaattcctccttgcaagtatcttagaggattttgctgataagttttgatttagtctggattgtcacaaatgctatctagttaagcttttatgccattttgtagaaaaattcagtgaccattttggctaattttgagcaagtcacaaatattttttcaacttggtaaatttataactgtaaaaaatcattagcatattttacggaggtttatttcatggcaaacttttttggaaatatttttggtgaaaaagataagcataaacgtaaggaagattcaccagtagaaagcaagaaagagaatggtaaggacactaaagttcttgcaggtcttggtggttctaccaaaatggcagaattgttaaaggaagatagcaaaggcactaataatgacgttaagccagccgttgcatccccagagcaatccaaagctgattcggataaaagcaatgctgataataccgaaactgctaagaaagccagcaccgataatcatgacacaacggttaagaaagatgataagcatggtaagacggtttcagttcaagatgaacctgacttaaagcctaaaccagctaacaagcgtccagaaaatccgaccaaaccaatcgtggtttcatttacttacaagggcaaaaagattagaaatgactttatttttaccgataagatgggaactcacttgaagctatctgacttgcccgaagttaaaggatataagcttaatttaaaaaatgaacttaactatcaaattggcagaactattcagcatgttaccttgcattacttaaaagacgaggttaagtacgatttgattcctgtaaccgaggatttaaagccaattaatcctaaagcaattcgtcactatgaaggcagaccaggaacagaaatttctgcaactaagtttccagttattaagggttatcgtgtttacactagtcgtaaatatgaggtccctgatgatggcaaagatgtgaaagtagtttatacgccaactactcagacgattcatctaatttatcaaacgattaagggtgaagttcttgggactagtactaagagcggcaagacaggagaagcttacagcattgatcctaagaagcggtcttttgcaggctatcaattatctaagttacccaagaacttaaaaggcaccttccctgccgaaagcatggatattacgattgaatatgaaccaatttccagcaagattgaagttagcttccttgatgaaagtggcaagccaatccatgcaccaatggagtttgaaaagaaatacaaggacgcatatcacattaaattgcctgtcactgatggttacgaattagtaagcaacccatctttgcttaacggcttttacgacagagtaaccaagcacattgtcttacgttacaagcgagcaacagcaaagtttaatattaatttctggtttgataaggattttaagcatagtgcaggcgatcctcgtccagtttcaggtcgagttggtgatccatttgctgtacaagttcctgaacatgaaggctacacgccagacaagactgttgttaaaggaaaattcagtccatatgataatccagatgtagacgtggtttactctaagattcctgccgaagttcatattactttggtcgatgaagctgatcgtcctttgccaaatcaaccacaaattgttaaaaaaggcttttggggcgattactttgaaactgaattaccagagattccaggctttaagcgtccgatgaaggttttgaagaagaaattttatcgggcacatcaagccgaagaagtacattacgtagctcaagaagttagtctcgttgttaattacattgataacaagaccaaaaagccaattgatggctaccctgctttccaaaaaccaggtctttcggggaccagttactcaatcgaaggtgaaatgatcgatggttaccgtctgattggtttgccagacaacgcttctggtgtttacacagctaagccaatcactgttaacttaatgtatgatccaaatccatcagaaattgttattcaccgtgtagattcaaccttaaatccaatccgcaagacggaaatccgttcaggctattatggtcaaacttatgatattaagactgatgatattccaggtttcaaatttatctctgcttctgatgatcttaagggtaagttccctgcttccagacttgatctttacctcaattttgaagcggcagatgtaacctttacttttgtaccagttgaccaatttggtaagcctttcggggatgaatataatatcgttatttctggtaaagctggacaagagtttagtcatgatatgcccgatattccaggctacttaagtacagctactgaaatttcaggcaaaatcaaagctgaataccaaaacgaaaaaattatggttccatacaagccaaaggacgaaactattactgttcatactatttacgcaggtggcaataaagacggcatgcatccattccatgactttactcaacctggacctgttggcagtacattcaagtacgagtcccctactcttccaggctttgaagcaaatcctaagaacatctcagctaagtttgctccagagcctcaagaagtgacaattgtctacacggtaaaacaagaagaatacttgattcaatttgttgatcttaaaggtcagcttgttggtggaatgccaaaggctaaaggctattacaaggaagctatcagtattggtcaagcaattcctcgtggtttccatctaccagatggcgttgattctcatgtttatcttgatggcagtggcgactatcgtgtacaagttatcccggaccgtttaactattgaattgattgctcaaactgttgacggtaccgatttaggctcacgcagacaaattgatggtgattaccacgaagttaagacagttaatgcattgccagttccaggctacacccctgttaaaggcgataaagtatcaattaaatttgaactcggtcaaactacttatccaattatctatgaaccagaagaccgtactttgacaattagctacattaacgccactactggtaaatcaattgccgagaagaagattgttcatggcaagtttaacggtgagtatgacgaacgtgctaagcagattccaggcttcgttgcaatcaaccgcactcatgaagcaggtacttttggaatgcaagatattgaaatggcattcttataccgtgcatcttctgatgatttaaaccgtgcaattactccaattgaggaaatcatcaaagaaaatcaacaagccaacaatcggaatgcccaagcggttgttcaagcaactcgtgtgccagaagtagaaactccaccatacgatagtaacgacactgttccatctgctcaacttaagaacactcatgttgaacatgtagcaaatactctaccacgacaaccacaacccaaatactccaacgcagtctcagactattattcaaatagccaagatgatcctgctatcgatcaaggagcttcaaatttgatgaataagctttacggcaaacaatattatgataatggtcaagatcaataaaggagggatccccatgaaaagagctattagattaagtggggatgtctactctattgcaagttttagtaaggaatttggttatccctataccaaagtcctaagcttgtacgatcaaggttatcgggatcaagagttggtagataagttaaagtcagagcaattggtcattgacggcaagacttttaaatcattgttgcaggcatcccaatattatgggattccacccactaccttttatcgctatgcaaaaaaaggtaaattgaaaaaacttattaaacgcaagaaattgcttgataagtacgaccttaattagaaatgaaaagcatggtctttatttgaccatgcttttttgtcctttttagagaaaacgagatttggctaaaaaagttaggcataatagagcatggatagaggaacaaataacttctcctctgtccatgtcatttgttagttatctagttcatttgtaattttttgtaatttcttcgttatgtttaaatttttagctagattacttaacagactgcatgtgcagtcaaagaattgattcctattactacagtttagtttctgggaatcatggaacttaaatggtctgcatttcttgctcgcatcctttctgttttgtatgttttggggatgcaggccatccatttatttctatttcatatccttactaacaaagcaagtctgttgttttctccttaacgatggatttgctttttcacttatgatcttcttgctggattaatttgaaagccgtagaaacgcaatctcagcattcatttttagctttttgaaaaagcatgtaattgcttttagtttttgttagtttagagctgtgccactgaatttagcctttcaaaaataaaattattttattagcaaaacagaataatttcatttttagggcggtgggcacaattaattttttaagaaaaagactgaaacgtaaattatggggactagccttatcggtaggcggtttctttattatcatcattatcattattgttttcttcgcaggtggggctatttccgaagaaagcaatggtggtgattgtagtaatgattccacctcttctagtgtttcgattaaaggtagcaacggggcttggacgcagaaaggaaccaaagcctataacactgccaaagctatttttaattttttggtgcataaagaaggattctcgggtgcaggtgccgcaggtgtagtagctgttgtcaatcgtgaaagtggttttaatccatcaatttctaaccctgcaggtggtgtagttggtttatttcaatggggaggctggaatggcgatactagaaatagtgatcgtattcactctggcggcattatccattcatctaaggatcttaccgtaagtaaagaattgaaattgcttgattatgaattgcatcacggttatgaaagagcaagaagtacagttggacgagctacggatcctaaaaaggcggccgaacaatggtctctgctttatgaaggcgtgtccttgagtgatggtcaaacaaaaatagatcaaattcatggggatgcagaaagagcctaccgtttatttggtggatcgaagttcaaggctaaaggtagtctacttggtagcggctctaagactgctaaaggttcatcatcggaagactctggtgatgatgaatgtgatgatgatgcaattggaaatggtggtccaattttaagtcaagctaagcatcttattggttattttacctacggtgcgcacggggtttctggctatggtggctggaagcatcctaacaaaaatggtcaaacggactgttcaggtttcgtttggctctgtatgacgcgtgcaggctatgatgttggtaatgacgcgttctctactcctgatatggaacgagatgctagaggtccgcacaaataccttaaacagattagccctaaaaatgctaagccaggagatgtaattatcatgaatgttggtgcaggttatggagcaagcggacatacagcagttattgcaggtaaatatcacggctatcaaactaagatcatcgaaatgggtggagataataatggtcatgttcatacttctaatattcacgattctttcttaagtttgattcctaatgctcggatcacttgggctagacctgtcaaaagaaagtaaggtgttgtaatgtgaaaagacagcaaaagcaaaaagagcctaaatctcctcttttgtattttggcattgcgattgggtgcgtagttatttttgggattattgctctaggtattaattcctaccgcaattcacaagctcaaaaagcgaagcaggaagaacaggttcgacaagagaaaatccgtaaagaaaaggctcgtcctaaatttaaagcttatcaagcacaagataattctggtagcgataagtcagaacagcttactaaaaaacaagccactaaacggttaagtgcggatattaattacggttttaaattaatgcaacaaacagacgcattagttgggactaaaattacgcaaaagcagttgtccactgcacaaagaaaaaatgttgctaaatattttgattcattgactgtatttaatagctttaatcaagcaacaaatatctctactgcttcgggacaaaatttttacgggcaaaatggtcataacaagacctataaaacatccaagcaaggtgacccctaccgtgttactggcggatcagttgaatacaatggcagttcttataatgactatatatttgatgtcctgcttcaatacaaagcaggtgcttacagcagtaaacgctggctgaccatttacgttgataagtcaacgggcgttatgactcaagtcaaaatgaaaggtaatcaaaatgagtgatcggtattcacacaagcgaccgcagaacaatctgcctaacatagtaatcattgtcactgttgcattaaccgtattgatgattattgcttgcatttacatgtggcataattcgcagaaacagaaagctttagcagagcaatatgctagacaatacacacagttacaagaaaaagaagcaaatttaaaacctgacgttacagcaattacatcaggtaaatttgacctgcaaggatcagaaaaatctttagctaaggattatacggtcttaattaaagccctgttcggggatgcatcggcaaaagcagttaaaaatgcggaaaatagctatcttaatcattttggaacagatggttggcatgatctcaaggagattgcctttgctaatccaaattcattagttgcaacagcaaactctgatactaaaattacttttaaagattttagcttgaaagatcaaaccatcaaaattgtaatttatacacgttttagtgttcctaaatctaagtcatcagcaggctatggtattgcctatatcacaacgacctataatttcaaaactcatacagccagagatacaactgtacagagttcatttgcagatgataattaaggcggtgactatttatgacttctaaatggacgaaaaagaatatttttattgaatttgtattagctactctgtttgcattttctctcgccctattctttattttttccaactcaaacggtaaaaataaaactttaaatttagatcagcaagccaaggttgcacaaataaaaatgcagattgatgataaacaacatcagcttaatcaagaagcatatcagaaagctcttgatgatcccagtcaagtggtcaagatgaatgttcgccagattcaggcttctcaattagctaagactcaagctaacaagctttttccgatcttgcttaatttttcgacttctaaggaatacaattccagagctgataaatctcaaaatttagtaactgaaaatgttttgcggaataaaaatctgtatggttctgattattcagatggttctcactatgttgacgcatcggggtatcattccaagtttgacagcgtagaaatttcggatggcttgcttaaaggcaatgagttgccagtaattatgcatgttaattcaattaattggttctcagggcagcataaaggacagactggtgatatttatgtaggtacttttgattaccaatcgcataagttctcacaactacaaattttaaacaatctttaccgtggtaatttgaccgttaaccaaggacaatagtaatttttaagttttccttattttttaaattttttagcttaaaatcaggctaaaaatcctattttaagaaagaggtttgattaatatgttatctatcgtttgtcgaattataggtgtgtggtttgtcgcttgtgcgtgcatcctattccttttttgctttgcgcaaagaaataaattcgattttcaagatggaaagaatgctgttcaagagttgtctatctttttttgagatttggcttcccttaaacctaatcggtttttcagcattcttttttgctaatttagggtaaaagtatgcagaatgtaattacagttttaaatgctttgtttttaactattggttatctggcaggtttttggggcctgccagtcattattattctcagcttgacttatatttgtcgggacgctgaacgaacattggaccgtacagtaactcctaaagcggagatttactttggttttattggcataatgatacatgaagcaagccattggcttttggctaaaatttttaatcatcaaattatcgattgcaagttgctagttatgccatgggaagttgatctttctcagtcccaccctcagcttggttatgtgcgtcacgcttatagcgatcgttcattttgtcagatggttggcaatgctttcattggcacggcaccgatatacggttgtacagccatcctgtatctagtttttcgcttatttatgccccacctatttaagtttttgacggatacaactagtttattgctacatcagcccaaattgataaatagcaattatttgttaacttatcttgttcaagtagtctcatttacccctagaagcctatttttgacttttatagcgcttttgctgttaatcaatataactttaactggatttgatttaagcgacgcagacctcaaaaatgcacgtacagcagggatgtggattttaatcatattagctatagttattttcccactggttgcaagtggcatgactagttttcttaatttttacttaattgcttttatttcatggctactcacaacattttcgttatccctagtaatagcagtcttagtaaatgttggctgtcatgtattgcattttttcacaaattgagcctaggtcccataaattagtaacgcactttagaattaaaaatgtgcttagaaaagcatgattttttaatttcaaagaaagaggcaaagactttatgagtatttcaaaaaatatcacatctttgactggtgctacacttgcagttgccgcaggtggtcttgctgtcgttaatactcctaatatgagtatcgttgctcatgcggatgaaactcacgatcagaatgtctctactgatccttcagtaggtgataatcctgttcaagatccaacaaaagtgtcaactattactgacgcttataatgacattcaaggtgatactgcacgcgataccaatcaaatgcaacactcaagtatcggctgggagtaccaagaccctaatcaagcggccgaatcatggaaggctccagatgataccaaggttgagccaggcactgacaacactcaaactgattggaatattgctactgggactaacggtaagagtgcatcagatacttcctatgatgtaactggagattcttccgaaaataaatttaatccaggtaacattaacctttatggtgtaagtgctgtgtcagacaaatctgcatcagttcgtgaaaattggcctgcaatcgaaaaggctaacatgaactacgatgactttattgctaactatggatcatattggggtcctatttattggggttggtattcacacggctacccatatgcaattccttatgcttatccaggctacggctatggctacgtaggtggcggtgctactactgttgtgaataataacaacaataacaacaataacaacaataactcatcaaacaacaatggactcaacagtcttaatggtttgaatgcaagtttgttagctgctaatggtgccaatggtgctggcggttctggtaatggcggcaataatgctagtggattgaacggtcaacagcaaagtggtcagcaacagtctcaatctggttctggcaacaacagttcttcaagttcatcatctgctaactcacaaaccactgttttacctggtggtgctgtagttcctggagttgcaggcggttattatggtgttggtggtttaggagttgtaacttcaaacaacaataataacaacaataataataattcaaataacaattccaataacctcagttcattgtctaacttatctaaccttgcttctaacaatgcgggattagcaaacaatggcggaaatggtggtaacggcaacaacggtaatggtctggtaaacaatggcaacaatggtgatcttggcaatcaaaatgataaagatttatctgctaagaaagctccaaaagctaagaagaatactgacgcattaacccctgctaaggataaaaccgctaatacggccgttagtgataatggtgcgcaaactccttcaacggatgcaaacgcaacctcaactactggctcaggttcgggcgatggttcaggttcaggtaatggtgatgttgttggttcaggtgtagttgcttcaactggttctaacgcaggttcaggtagtgctgtatctgacggtggttctggttcatcatcatctgctctgcctcaaactggcaattctcttaagttgcaaaagagttccgctttgggtgcaggaatgatcgctatgactttaatggcaatgggcgtttcaaaaaagcgtcaaaagtaaaaaaattgatacgttttacaaaatacatgtgtgtgtaatacaaaaagacgacttttaatgtcgtcttttttttgattttgagagaaaaacaaattcattctgaaaagttatagattatggtcataccttttaaaaatgtcagaaggagttaagaatttaatatgaatgcaagatttttagtagatttatataattggtctaatcctgctactggctatattgctatggttaatatcggttggatcgttattgtaattattatggctttagttcaacataaggacctaaataaatgggttgccaatgatcctaatcatcaacccgataattggcagattccattggtcattatttttgttcttgcttgttctgcccttgcagtatactttaccccttattggttacctggtgggcttggttggtcaacattcattatccctgttgcttgctatggagctgagttgttctttaccaatgattatcgaaagactttatcaaagcatgtttggaaaacttggtattggcgtattgtgatgtggggtgaatggctagttgcaattaattttgtttttgccacagcctttatggttttatcacggattgtcactaactattaagctgaggtgtttgatatgtcaatttttagtaaattctttcatcattcaaaagcaaaaaagtctgaggtacgtaaattaaacgggaaagtacaaattaacccccctataacgggttatgataagcattttgacaaaacgagctattttgtcaattacactggcgtagcaaacgaaaataatcctcgcttgtccgcaccgtataagccaagtaattctaattagctagagcaggactagacgcagaaaggaacttagtaaatggcgtctcgtcgcaccctagatttaaaggccgaatttgaaaactacaaaagtgaaatttataccatgctgattgcacttggttgtacgcaagagcaagcaattgcttatattgccgacaatgaggaaaccatccgtagctggcttgatccaaagagagggcgcattattaacgctcaaatgggagctagattattgctacgaaaggcataacaatcatgaatcatcgtcatttcaattttatcggtctaattactactttgattgtgatcgcaattattgcaggtatgttattttacatttattctttaagcaaatctgaatcgggtaatcctttgactactccagttcaacaagaaaatatttttgataatcttaaagacattgtattttctaaattcaacattaagtagaaagtccttaggggcttttttattttgcttttttgatttttcgctgaatcgagccaagaacgtgtattttctcttttccacttacagttaaaagtacggaaaggagaaaattttatgataaaaaaaatccgagaatggatcgaaagcttagtttctaataaggaaaaagcaatatctttcctagattcacttgatttagaccaggcgattatgacttttgaaagcttgcaaaagttcctttggatcgttccttgcgtagtttggggaatccatgtaattctgttgcttgtccctgtccttaatactctgaactttcagtttattttgttattgctgtttctagtatgcgttttaaatattatggcgtgtttaatcattaaccgctatttgttttatttttattccagacaaccaaaactagatccagttgaaaagattaatactctttggtcaatccaaaaggtatcagatttacaaagctgtataactgaaggggcaattgttggtctgcctgttacctttactatcctgccctatttagagtttttacgcttgcatccatctattgcaggctggactacggcaatgaccgatcaattaagcggtaatccgcttattttgcgtgtgtttatctttacgcttcctgttattgcaactttctacttttttgaaagagttcgaaaccaggaacgtcaacaaaagaaaaacattgatgattggatgggacgtttccagtatcacaaacgagaattgcactctgttttgtccaatcgtcctaaagaaacgcaaaaaatggtctctccagagccttacttaactttaggtacttcgatacttaatggcgatattgtagaacaagctcctgttaatcgactgcaaaatgcctgctattttggaccggttggtgcaggtaaaacctctacaatttttattccgcagatcaagcaggatattgaccactatttgcgttttattcgagattatcccaagatttcaagagatcccgattttatgaagcgtaaaggcaatgttgctactcgctatctaaatggtttgattgtcattgaaacatctaatgacctttgtgctagtgtctatgatttagcaattaaaatgggcgtgccaaaagaaaaaattacttggattgatccatcaaatccagagtcacctgccttaaacctattgcgtgggcctgtagacacggttgtagaaaccgttactaacatcattgcaggggttaaagctgataacaatgatttcttcaaacagtcggaaagatcacacttaaagaactttatctttttgcttaaactgtcttgcgtagttgaaaacaagattgccacttttactgatttaatggctctatacaatgatatatacgtagttgtagatcggatgaaggtgttggataagtatgttcaagcgctaaaaactaagatgaatgacgctaaagccgattatgacgctaatcccgatagcaaagcttataagactcgttatcaagaaatttttgataagtacgagattgcgtatggtactagtcaatggttccacaacaatattaaagttgctacttttggtcaaggtgtccttaaacaaaagtcaggtccgcatgaaggcgaagtaatgtacgttgatgagcaagctgaaaatgtacaaggtttaaaaaactcgctagacgacttatccaagaaccaatatttgcgtagagtactgtttagagacagtggtgactttaactttgacgatcaattgcgtaatggtgggattatcctttgcaacaccgctaaagctgagttgcaagatcaattagcaggacgtttaggtcaaatttatttaatgagctttcaatctgctacttttagacgaatgccaaaccgtatgccactgtttgctttgtattgtgatgagttcccagattttatctcagaagccttcaaatcatttgtcagccaagctcgtaagtattcggtaagtaccactatttgtgcgcagtcaccgagtcagttatcatacagctttggtcctgacttctttaacacgttaatgactacaatgctgacgcgcgggactttcggagaccttggtgcttcggacgctaaattgttggagccgttctttggggagcattccgaagtagaagaatccatcaatgaacagcaagttgacctgactgccgatcaaaatagcaatcgaaagatgatttctgctcgcagacaaacggtgccaaatattactgctaatgaaattatgtctttgcctaaatttacgattgctttgcgtcaccctaatccacaaggctcagtgatgtttgacctaattaagacgcattatcttaaagacgaggacattgccaatgatccaaatatctttgatattcataattctagggactatgaagcatttgaagatatgatggctcatgcctaccatggtaatgccgactttgacaaggtagatttagagatcattgatgatattaagtcaggtaaaattgaatttagagatactggtaaaggcaaaaagactcataaaactgtaggtgcttcggcagatgatgatttaaaaaatctgcatcagaaacataaagaaaacagccctaaatcaaatagtgaatctgataataaatttgtttcaaatgattctgatactcaaaacgagcaaggggtaccacaaatttttagcgattttgatcctgatgatagtggtcctgaccttagtttggtacatcaaggtgaatcgaatgctgaaaaaagatctaagtttagagccttggctagcgaagcagtaaacaaaactctaaatcatagcggacagaatcgtcttgataatggtgtagaacaagatgaacacttacctactaccaaacctgagactcaaaaaaatgaatctgctgatgataatacagatttttatcaagatatgattgataacatttctacgaatgatacgtcagaaaaacctaatgaagaggtgtctgaaaaagatatgatttttgaaaaagacggtaatttatacgagaccaaaaaggaccgtagtcaattgcaccaacaacaagcaggttctgaagaagcccaaatgaaggccatcagaaatcaaaccttgcatgacttagaacggaatatcaaagacattcaaactgactctgctttaactaatgcagtcaagcttgatcgcttgaagaagctatataacaagaattacgagcaaattgtgaccatctggcccaaagatcatgatcggattctaaatagcattaagcatcagatttctaaaatgaaaacacgagtagactccgcccctgctccaattaataaagacgataatttagattcaattatgaaaaagagccgtgaagctggctcaaatcaagccttagcagatgaattgtctaaaatgcttgatgattttgaagaccgaccggtaaccgttgttcctgggaagcttaaagatattgcagatgatggatttatcaattccagtgacccatttaatcaacagcatggaatggatgatgaataatggctaaattaactttaaatgtcgaagccttagttagccaagatttgactaaacgtttattgtttcagcaggcaatttctcagaacaattctgcttgtgttcttgctttaaatgatatttatttagccgaagcaaagaaattattgcaaggcaaggccttatttgtggatgattatcctaatgacttctttttagatcacaaaatcctaaatgatactgctaaacgtaatgccttagctagggcctatatcgtgtccttcaattccataagagaagttaagttggcacctgtctttatatcggggatgcttcttttattagatcaaattagtttagcaaaaaaagtaactgtctttgatgtccttacgcagtggcaacagagtgatgatgaacaaattctgcatgagattaatcatatgaatgtagaaggacttaataaaacccaaaccgatattctaatggcgattattcaatcattgggcgttgaccgtatgcaatcatttagaagcttactcaaaaagttttggcgcatccatgctaaatatgctactggcggtaagtttcattctccgacagattggattggcaaaaatcaattagttattattcctgcttcaaaagcagatgttaattcctatgcaagattagtctttaattttgctttagaaaatcgaatggttactctaattgattctgatgttcctcaaaaggcttatttgccttttatagctgatttaaagtcaactatgtatatttcctctacaaaaaatttaagtggcttacaagtctccaatttggcatatcaagcttctaaacttaatatgtctattcagagttttgatgcagaactatttacaaattggctaggacgttactatcctgctttaattggtgattattctttacgagactttgagcgagtatttgcagaatttaagcttgcaggctatcttaatgcttttatcagcgtggaagataatacattaatattaatcagaattgatgaaaacaatcagttagttaaacaaaagttcagtcttaagccgatcttggagcaattagataaagctattcctgctaaagtgaccaagcaagatggtagtcaagacatcatggctcagttacaaaacgttcttaagaatcagagtgatttacagacactcattcttaacaaattgcaagaaattgaacaggaatttaatgctcataatcagcaacaacttacccctgctaaattacctgatatcatgagcgatagtgaggttattaatgatgagttcgaaaaagctttagcaagacaacgagaaagaaaagaatagcaaacaaaaaagcaatgtttcaaaaacattgcttttttgttgtgcctagactttacgaactggattagataatttccttaattatcatctgcagggataattggaatgtatttaagccacatttgcatatacattggtgtattgacttcggacgcacagattggctttaaactcttgactaattgtgctaagtcaagatcatgataggcaaagtgatatttgtttttgattaaatcagttgcctttgctccttggtctagccatgccttaggtgcaatagttaatgtagtaccgtccgcaaagatcagaatgataaatttactttgaccaataatgactgattgcaacaaattgagcgttctacgattaagtgggatatatgtctcactattgtctttaagatcaagtaattttagagttttgactgtcatattgtccaagtttgcgttcagttctactttgagtttattagcttgttcaagccattcagtagtttcaaaagtagcctgcaaatttaagaagtcattgggtatagtttttctttcgtttgtttcgggactttttattgtttcttgtcttttttgtaaacgtgtttctgatgtgaaattatgtttctgttcgacacgattaatttttgactgtcttttttcatcgtacctattctgagatatgaagttttcgttttcagattgctcttttttcataggagtcgatttattagttggtcgtggcttggcaacagccgtctttggctccataacgttgtgattgattcgtgaacttctggtattaagtgcttctgtatgagtagagtgcttgggaactggtggaagtgtctcaaaatgacttgtagttggtaacttttgttcgttttcaattctgggtgctttagtattaggtccccaatcttgggaatcccaacccgctttgctaaattgttctttttctgcttggggcttaggctggtatcgtggttgcgtattttttctttgctcattttgtaatttagaaatagcgctttgtgcatctgcattttcttctgatttaggcacatagtgagttaagacataatgaaaatgatcgctatttgcccgataacttctcagcagtttgtataaataactgtttttataagcagttaatttcttagatgttactagactcatttgatttcttccttttccttaaattttgaactgaatttagtttagcaggctttggagagcatttttcccctactcaaataaagctaaaattcaagtcattttttcttataattttctaaaatggataatttagaaaaggagtcgtttatgtcagaagtttctgaacaaattgaatttaacttagcccatgatggtggtaacggctatatgaaggacagacttaatgggcaaactactatttttccttctgtattagcccgttttttgccaggaatgcaaaacaatattatcaaggctagcgatactaaagaagttcaaaatttattaaataattaccttgacgatatggatattactgtgcaaagcaatggaattaattctaatggtcgatacttagtcggtaaagctggaattaatagtggcgctcctcttatgacctttaatgtgtcgagcgttgaggggaaaagtacttcggatattagtattatttccgctctctctttagtagcttacaatgcagtaaaagtctactatgagcagtacaataatttgcctgaaaatttaaaagtggaagtagctaaaatggcaaccgatttaccaattgatgagacaaaaaatagatcaattagggaatcttacattactagatttactggtaatcaacatatcgttgtaattaataactttgataatcccattaccgttaatgtcacctttaaaaaagcttttttggaagcagaaggtgttgttggtgaacgtggattaattatgtcgcccactaacgcagggatgttaagagatgataatgtttttcaaccattaattgaagactatcaattagatagttttgacggacaggatttaatggaagcaggcaatactattggtgttgatattggtgacggaacggtagatttttcagcaatgaatggcttagctagtttacctaatatgaacgattcactgaatactggaattggtaatattgccgaagaagcaattaacgctttgcatcaagcctatccagctattagacgtttgaatcgacaaaaatttatggaaatagccaaccgtggcaatgatgaagaaagcagaacttatcattcttttctggatcagcaaatgattgttttgaatcaacaaatcatctctaaaattagtactttgtacagtcggttagaccagcaagttgggatgattattattagtggtggcggtgctgttgcactaaagcctacattaagtgccagtctcaaagagacaatgaagcaattagatagttttaacaagactaagattttttgggtaggtcctaaatatgctcaaactctcaatttagatggactggaagctagaattttgataatgtaaggtgatttttgatggtaaatcaaaaacgaactaagcgttcatcttcaaagcaattacatatcttgctgaatgagactaaagatcatgatattatcgattttctagctaaacaaacagtttttaatcatactgcactaactaaactagctttgcgtaacttaattactagttatggtaatgttgatttaatgtctctttttaataatttaggatcaaattcaagtaagtccactttagaaaatgctttgggtaatgttaagtcaaaaaaacatactaataaggagcatcattatagttcaaagccaaaacaaaaaaataatgaggaaacaggtagaaagcaaaagaagaaaagtgatagtggtttcaataaaaaagctaaacctattccaatggatcaattaaaatttttagatcccgataatcttgacgatctataatttagctattgtcttaatggatgatgtcttagaaaatataatatttattcatccactttacagctttaaatcaggtctagtgaagcttgactatcttttttatagaattttgatatagtttatttgcagtatatactatttctatcttatttctaccatgccaaacaaaaacatgtaaaaaaggagtatcagcgtctgctgatactccttttatttctttaacataatgccatatgactattgtatagcattatactttctttctcaacttttaagacaagcctgcgtcgtttaacagatcattatctgtatcattatgactaactttttttggagattgtgatggcttttgagtcttttctttcgattctatcttcgtatttttattttgctgatttacttcttttctcccttctacttcatgtttggattcagttaaatcgttaaaattagatttttttcgttttaattgtgcctcatcagacgtagtagaagatgtaatatcacctaaacttaacttctgggttttagcgacctgagaaagcgatattttaatcagatcttcatagccatagtttcggatagctaaatctattaaatgcttaagagacaaagttttgttactttgtgcttgtgcccatcgaaactcaggacttttaggatcaagtttcaaatttagttgtttagccatttttcacatctccaatatgtttaagtcaatattattattcaaatttcttagctaaagcttcggcaagtagttggagtccaatttcatttaatttttgagcatattctttatctacccaaacaagtactgccgaactcataaagctttctagtgctgattgcagttgttcttttaagtctgtttgttctcctaaaggaatactgccaccaccgaaaacataaattacttctaagcgattgttttcgtttaaagcgtcatttaagttctgttttatactttctaccaaagagccagtactcgaagcaaccgcttctgttgcaatttcttgtttttctttgtctaatttagttttagcaggctcatttaaaacattggtaaattcaattacgtctttacatggaaaatgtcttctcatttttggtaagttcttccaagcataacgtagaactgtgccatacccctcttgaatagaattggaagccgcaagatcagctttaccgttgctagtcattgccatgtcagtagtcccttgaccaatatcaattcctagcacattcttagaatcttggattaagtcttctgcatcgtccgcacggtctggatagtttttcttaatatatttcactagagaatttataagctctctagggccatgttgaatgccgattacagtagcaacttctccttctttgaagactcttacggctacaaattcaatcgtaacactaattggcgtgtcaaaattgtttaacacaactacatgctttcctttggtaaatctattagcgtattgttctctaattgtgctttcagctgatcctacttcgttgattggcaatgcggtggtcatgactacttttacggaaataggatcaaaaatattttcacctttttcgtaagcttcttgaaccgctttacctgcaataaggcttaatggcaaaataagcgataaatcggtagatgattttccattttgcgaattaatatcgaaagtagtacgtgcgagagttgaattgcttgctaagagtcctactaggtatcgcttcatattaatagtcgcatccaaattttcaagcagggaattgacggtttgctctactcgattttcatcattatggtcaacaggatcgtttcctgcttgatcttcaacttttgcaactactgatggctgattgatatattcaccatcaatggaagctttaacttctccatatcccaaatcattcgagacaatcattaatttatttttctttgttggcattatgtttacctctttctttattaaatctatagtcattctagcattattatatactgtgtgcaacagttttcttgttacttctttttgctgttctactatatttattcacttatgtctgcacactatattatagagccttattcgtaatatactttttttatactattaaagtatacttgcctaagccaaaatcaacagatttttatgtaaaaaataacacctggaaagaactgatttccaggtgcttatttaagttcgatattatttcaagttagctatcaatctatatcctaagaatccgttgctggaatttggattccaagcaatacctacaccaatttttgtatattgactagataaaagaatgtctctgtgttcccaatttgagcctgcatcatgataaatgaaattgtctaaacgaatttttgcttgtacagatggggtatcagtattatctactgcacctccagcaagcacttctgcgtattgggtgtggcttccgtctggtcttgcatgactaaaacttgtaatcgcttcggtagctctagttctggcatactcttgtaaagaggtatcaagtgctaaaggatttagtccttttgattgacgtaattcatttaattgtgcaataaattcttgttctaatttggtagcaaaatcggaatccttaatgtttgtatattcattattaaattttgtatttgtggtttcattatgctgaatagaactgcttgaattagcatttggagtatttgttgaattagtttgagtactttgagttgtattaacattttgtttagtggtagtttcagcttcttgatgaaacttctcagttatcttatgtgttagctctgaattaatccacttattagtaccaaccttgtaccatgtcttaccacggttatctttcttttttgcataaacattaactgtgccatctacaaaagttttagtaatgtgcttgttaggcaacttatacgcaggtgatggataaactacctctactttaaataatgctttattggcagaattttttttagtattggctaaattaatatagcgatggttcccaatgtataaatattttttaccacgaattgttttagtacgatatgcttttacacttctgcctttcttgagtgttcttgctcctttaatacgcttgcctttgtagttgtaaacataagcattgtgtgtaagccttacgcttctggtgcttgcctctactacattgacttgttcattgccagcaacaactgtagctgaaagcaatagagctgatgaaagcgtaatagtcgataaaactttagtgattttctttttttgtaacatgttagttacctcctatatttcttatttcaatttctaaattaatgatacatgatgaaaaaatacatttcataaaaactctatgatttcttcaaaaaagttggatttttatgaaattggaactatacactacaaaaaacaaaagtaaatttatgataaaaatacagatttcgggggttatctgtgattcataatccaacaaagaaggagacttaatatgaaaagtaataatgactttgaaagtcataccacactcaaaagtcgaaaaggtctaaaattcttttcagctctaagcatggctttgccaattttcatgcaaagcggtcaaaaaatcttcgcagacggtcaccactacttagaagtgcactccattcccgttaatgttaaaattctccaaaactcatttggagaacgtaaaggtcaaatggcccgtgtttacagtatttctggcggtttctgggaagatcaacataaagg

SEQ ID NO: 3 - DNA, 2405804 bp, Lactobacillus crispatus
  source 1..2405804: mol_type = genomic DNA
ttgttcgacattaataaattttgggaacactttaatgacgagatgcgtgctcgtttcaacgaagttgcctacaatgcatggttcaaaaatactaaacctatttcatataatggaaaaacacatgaattaaaaattttagttcaaaatcctgtttctaaaggttactgggaaaagaatctatcttctcaattgattcaatctgcctacggttatgccgacatcgagatcttacctgtatttaaaatatctgaagatgcggatattacagaaaggatcgtaacacctgcgccaaagcgtgaagcgcaagttcaacagcctaatttgccagaaaaagaattcactaaagacttgaagttaaacgaaaaatacacttttgataacttcgttcaaggtgagggaaacaagttggccgccggtgctgcacttgctgtagccgacagtcctggtagtttttacaatcctttatttatttttggtggcgttggtttaggtaaaacacacctgatgcaagctgttgggcatcaaatgctagcagagcgacctaacgcaaaagttgtctatatacagagtgaaacttttgttaatgacttcattaattccatcaaaaataaaacgcaggacaaattccgcgaaaaatacagaacttgtgacctgcttttagttgatgatattcaattttttgcaaaaaaagaggggattcaagaggaattcttccatacttttgagacactttataacgatcaaaaacagatcgtaatgactagcgatcggttgcctacagaaatcccagatctatcagagcgtttagtttctcgatttacatggggcttgcaagtcgaaattacgcctcccgatttggaaaccagaatcgctattttgcgacgcaaagctgaaacagaaggttggactatcgatgatggtacgcttaactatattgcatctcaagttgatactaatattagagaacttgaaggggctttagttaaagttcaagcttatgccacaattgaaaaagcagatattgacgttaaccttgcgcgtgaagcattagttgacctcaaattagttcaaaaaaatcgtggattacaaatctctaaaatacaggaggttgtcgcaaactatttccaaacttcaactgctgaattaaagggtaaaaagcgtgtacggcagattgtagttcctcggcaaatagcaatgtatctttctcgtgaattaacagatgccagtttgccaaaaattggtcaagaatttgggggaaaagatcataccactgtcatgcatgcttatgataaaatcgacaagcagatgaaacttgattctgatatcaaaactgctgtctttgacctaaagcaaattttggagcactaaaagttatccactgtggaaaaataaacaagttttacacaagtttttaaccgtaacaagtccgttattttaggcttcttatgagttttcaacagaactcacaggccctactactactaattaattatataattactaataaagagaaatcacacagctattcttgggaggaaaaacatgaagtttacaattaatcgcaatctgtttatcgaaaacctcaataatgtaatgcgggccatctcatcaagagctactattccaattcttagtggaattaagttagacttaacagaagataaacttacgctaaccggtagtgatacagatatttcaattgaaattcaaattccagtcaatgatgatttaaatgtggaatctacaggttctattgttttaccagctagattctttagtgaaatcgtaaaaaaattgcctggtaaagacttctcatttgaagtaaaagaaagttttcaaactcagatcatatctgaaaatagtgaatttacaattaatggtttagatgctaataactatccacgtttaccagaaatttcagatgctgcttcattcactatttctggtaaaactttccgtgaaatcattaatgaaacgcaatttgctacttccaatgatcaaacacgagcaattttaactggggtacgtttcttctttagtccagataaaattaaagctgtcgcaactgattcccaccgtttatctcaaagaacaattgctttagaaaacggacctcaagctgaaactgatttgattattcctggtaaaagtttgcaggaattagctagaatcattggtgaagctgatccagaagttaaagtttgcccaggtgataaccaagctttatttgtaattggcaacttgtccttctattcacgtcttttggacggaaattatccagacactgatcgcttgattccgactgaaaagaccactagtgttgaatttgacatttccgaattatctagtgcccttgaacgtgccagtttgttaactcgtgctggccgtaacaacgtggttactttgactttagatgtagaaaatcaatcagctaagttatcaggtaaatctgcggaaattggtaatgttgaagaagatgttagcttcagaaatcttgaaggaaacaatttagagatttccttcaaccctgactatatgcgtgatgcgttaagagcttcagtaacagattctgtaattatgagttttactaagccacttcgtccatttatcattaatccagataaagaagacattgaatttgtgcaattaattacgccagttagaacatattaatcaagtacacaatatttaggtcataaaaagtcgtcaaataaggcgactttttattttgcttttaaacgaaaacgcaaaatattggcgtatatttatttttttaccgtgctagtgtgattaggttattttgaaaaaaagctctgaaaaggcttataagagcgatttagtttgttatttgtgttgaaaactaatataattatataggtataaagcgtattgaaggtgagcattattaagtattttaaagttgacggcgatcatattactttggggcaattcctgaaggaagagagcattatttcatcaggtggacaagctaaatggtacttaaaagataatccagtaactttaaatggtgaacttgaagatcgaagaggcaaaaagatgcatgttggtgatcatatagtggttaatggccaagaatatgagtttcggtagggaagtcaatgtatcttgatcattttactgtacagaattttcgtaatttaaaaaagcttgacgtaaattttgattcaaacgtcaatatttttattggcaaaaatgctcagggcaagaccaatttgctagaggcaatctattttttagcattaacacgttcacataggaccaataatgataaagatttaattggtttcggcggtgagtttaccaatttacttgggcatgtacataaaagccaggtggatcttgatttacgtgttttgatcacccaaaaaggtaaaaaagtatggattaatcgagttgagcaggcgaagttgtctaaatacgtaggtcagctgaatgcgattttattttcaccggaagacctcgagttgatcaagggtgcaccagcactgcggcggagatttatggatcaagaatttggtcaaataaatgcagagtatttatacttcgcaagtaagtatcggcaagttttaattcaaaagaataattatctgaagcagctagctaaaggtaaggcaaaggatcaggtctttttagatgtactttcagatcaactagctggtatcgccgctgaagttgtctttcgacgatttaaatttcttaagtatcttagtcactatgctagcgatgcttatgcacatattagtttaggcagtgagcagctttcaattgcttatcatccatcagtggctgacatccaagctgatgacagtacagaagaaatttatcaaaagattttagcaagttatgcacgaaataaggcaagtgaaattcgcaaggggacaactacttctgggccgcaccgtgatgatattgaatttaaacttgatggtcaaaatgcacatctttatgcttcgcaagggcagcagcgttcaattgcacttagcgtcaagctggcggaaattcaattggtgcatcaactaacagatgagtatcctttactcttgctggatgatgtaatgagcgagttagatcatggtcgacaaagtgcgctacttaattatattcatgggaaaacgcaaacctttattactacgactgacttagaggggatttcctgggaaataattaaaaagccgcgtgtgtatcacattcaatcaggcaaaattagtttggagaaggagaattaaatggctgataattcaaaagaaaatcttgaaaaggtcaaaaaatatgaaaaagaggctgacaagtataatgccagtcaaattcaggttcttggcggtctagaagctgtacgtaagcggccaggtatgtatatcggttcgactagttctcagggattgcaccacttagtgtgggaaattattgataacagtattgatgaacgacttgctggttttgcgaccaagattgaagttacgactaacgaagatggtagtgtcaccgttcaagatgatggacgtgggattcctgtagatattcaagaaaaaacaggtcgtcctgcattagagactgtatttactgtacttcacgccggtggtaaattcggcggtggtggatataaggtttctggtggtttgcacggagttggggcttcagtagttaacgctctgtccactaaacttgatgttaccgtaatgcgtgatggcaaaaagtactttatcgatttcgatcatggccgtgttaaggatgagatgaaacaaattggcacggttccacttgatgaacatgggacgattgttcacttctatccagatccagatattttcacagaaactattgtttttgatgacaagatcttgaagaacagaatccgtgaattggcctttttgaacaagggattaactttaacctttactgacaagcgtaaagacactgccgaaacagatgtgtataagtttgaaggtgggattaaggaatacgttgcctttttgaacaagggacaagaagtattatttgatgatccaatttatgttgaaagcacctataatggcattgatgttgaagtggctttgcaatatacaaatggctataagactactttgatgacttttgccaataatattcacacctatgaaggtgggatgcacgaggccggttttaagactgcgttaacacgtgtggttaatgactatgcacataagtctaagatcttgaaagataaggacgataatctttccggtgaagacattcgtgaaggaatgacagctattgtctcagttaagcaccctagtccgcaatttgaaggtcagactaagaccaagttaggtaattcggatgctagaactgctgtagataaggctttttcagaaacctttagtcgtttcttgatggaaaatccttcagttgggcgcaagatcgtagaaaagggtcaattagccgaacgagctagaactgctgccaagcgtgcacgtgaagtaacaagaaagaaatctggtctggaaattgctaatttaccaggtaagttagccgacaatacaagtaacgatccaagtatttcagaactgtttatcgtcgagggtaactcagccggcggttctgctaagcaaggtagatcacgtttaacacaggctattttgccaatcagaggtaagattttaaatgttgaaaaagcttcgatggatcgaatcttggctaaccaagaaattagatctttattcacagctttaggaacaggctttggtgctgactttgacgtttcaaaagcacgttatcacaaattgattatcatgactgatgccgatgtcgatggtgcccacattagaaccttgctgttgaccttgttctataactatatgcgcccaatgatcgacaagggctatgtttatatcgccaagccacctctataccaagttcgtcaggggaaagtggtcagatatcttgatactgacgaagaattgcatgattacttaggtagcttgcaaccaagtcccaagcctactgtgcaacgttacaaggggttaggtgaaatggacccagagcagttgtgggaaactactatgaatccagaaaatagaagactggatcgggtaagtcctgagtatgctaaagatgctgacgcagtctttgagctcttaatgggaaatgaagtttcaccaagacgtgactttattcaaaagaatgctaaatatgttgaaaacttggatgcataggaggattagatggacgagaatcaaactcaagatcatagaattaaaaacgtcgatctaactagcatgatgcgtagttcatttttggattacgcaatgtcagttattgttgcacgtgctttacctgatgttcgtgatggcttaaagcccgtacaacgtcgtattctttacggtatgagcgagttgggggtaacgcctgataaaccatacaagaagagtgccagaattgttggggaagttatgggtaagtttcacccccatggtgattcctcaatctatcttgctatggcacacatggcacaagatttctcataccgttacatgttagtcgatggtcacggtaacttcggttctgtcgatggtgatgagccagccgcaatgcgttataccgaagcaagaatgagtaaaattgctgtggaaatgttgcgcgatatcaacaaaaacaccattgattggcaaagaaactatgatgataccgaaaatgaaccggttgtcttacctgctagaattcctaacttgcttgttaacggtgctaacgggattgccgttgggatgacaacaaatatcccgccacataacttgactgaagttattagtggtttgcacatgttaatgaaaaatcctgatgctacaaccaaggacttgatgaaagttatcccaggtcccgattttccaactggcggaattattatgggacgtggtggtatctaccgtgcttatgagagtggtaagggtaacattgttgttcgcgccaaaaccaatattgagactgaaaagagcggccgcgagcgcataattgtgagcgaaattccatttatggtaaacaaggctgaattggtgaagaaaattgctgatttggctcgagaaaagactatcgatggaattactggtgtgcgtgatgaatcagaccagacagggatgcggattaccattgatattcgccgtgatgctagtgctagcgttgttttgaataatttattcaagcaaactcaaatgcaggctaactttggtatgaatatggtggctattgttgatggtgcgccacactttttaaccttgaagcaaatgctgcaatattacttggatcaccaagaagatgttgtaactcgcagaacaagattcgagttagctaaggcagaggcaagagcccacatccttgaagggttaagaatcgctctggacaatattgatgaaattgtccacattatccgcaatagtcaatcaagtgacattgctaaagcaactttgattagccgctttggccttgatgataagcaatctcaggctatcttagacatgcgtttggttcgcttgactggcttggagcgcgataaggtagaagctgaatacaaggaattacaagctaaaattgctgactacaaagatattttgtctaagcctgagagaattgaccaaattatctatgacgaattgcttgatattcaaaaacgattcggtgataagcgaagaaccgaaattggtgctagcgaagtcgtttcaattgaagatgaagatttgattgaaaagcaaaatattctgttgacggttacccataacggctatattaagagaatgccaattcaggaatttaagactcaaaaccgtggtggtaaaggtatcaagggaatgggtgtacaagatggcgactttattgagcatttgatttactcaagtacgcacgatctgctcttgttctttactaatgctggtaaggtttactccaagaaagcctatgagattcctgaatacggccgcgcagctaaaggattgccagtagtcaacttattgcaattggaaaagggcgaaaaggtccaaactgtaattaatattccggaaggtgctgacgataattacttattctttgttactaagatgggaactgtaaagcgtacacacgttagcgaattttctaatattagaaacagtggtttaattgccttaactttgaaagatggcgatgaattaagcaatgttttgactactgatggtaagcaaaacatcttaatcgggactcacttgggctacgctgttaccttcaatgaaggcgatgttcgggcaatgggtcgaactgctgctggtgttcgcggaattaacttgcgtgagcatgactatgttgttggttcaggtattttaggtgctgatgaccaagtcttggtaatttctgaaaagggttatggtaaacggactccagcttcagaatatccagttaaaggccgtggcggtaaaggtattaagactgccaatattactgagaagaatggtccattagctggtgtaacaatcattaactcaaataatgatgtgatggtaattactactgacggaattatgattcggtttagaattgatgatgtttcgcaaactggccgtagcaccatgggtgttcgcttgattaaagttagcgatgatagtcaggttgcaagtttaaccgttgttccaactgaggaagaacaagatcaaactggtgacgatgacgactcaaaaaatggataattaattaaaaaaacaaaaaatttgaacttttaaaaaaattatcaaacttttttgcgtaataaataatgagcagtaaaaaatctgctaggatcacgtgaaaacagtttggtaattttttatttatatgctaaaattagaaattgcgagtaatattccattactccttgttcttgattttagcaagaaccatatagtccagaaggaggtgcaatagtcatggcaactacaaagtacgaagtaacttacatcatcaagccagatgttgacgaagacaacaagaaggcagttgtagaaaactacgacaaggttatcgctgataacggtggtactatggtagaatccaaagactggggcaagcgtcgtttcgcatatgaaattgataagtatcgtgaaggtacttaccacattatgactttcactgctgacaacgctgacgcagttaacgaatttagccgtttgtcaaagattgacaacgctatcttacgttcaatgaccgttaagttagataagtaattttaatttattatccgttatgtgatttaggaaaggaaggtacatgagtatgattaatagagttgtacttgttggccgtttaacacgtgatcctgaattacgtactactgggagtggaatctcggttgctacgtttactcttgctgttgaccgtcaatttacaaatagccaaggtgagagaggcgcagatttcgtcagctgtgtaatttggagaaagtcagcagaaaacttctgcaactttacttcaaagggttcattagttggaattgatggccgaattcaaaccagaagttatgataataaagatgggcaaagggtatatgtaaccgaagttgttgttgataacttcgcattgctcgaatcacgcaaggatcgtgaagcccgcggtcaaaatggtggttatacaccaaatagtggaaatgctggcagtcaacctgctaacaatttcccaaataatggcggatcacaaggtaattcacagactaataacaatcaaaataattcacaagatccatttagtggctcaggtgatacgattgatatttctgatgacgatctaccattttaaactaaattaaagaaaggattctagaacatggctcaacaaagaagaggcggccgtcgtcgtcgtaaggttgactacatcgcagctaaccacatcgactacgttgactacaaggatgtcgatctgttgaaacgttttatctcagaaagaggtaagattttaccacgtcgtgttactggcactagtgctaagaaccaacgtaaagtagctaatgcaattaagagagctcgtatcatgggcttgttaccattcgttgctgaagactaatttagatcgaaataaaccaaaaggacaggacacaaggttctgtccttttttcgtataataattaaaaaaattctctcttcgtattgtaccctaagtgtataattttttacggtaagttgaataaataattaaaaaagcccaagtcctttgaatttggacttgagctcaaacaaaaagaccagtagtctgatgttaagaacaaaaaacacattagaagctggtcttttatgaattcaattgtaactgaaatcgcaaatattataaagtctgaagataattatattaagcgtgaaagaaaaataatctgtttcttcttaaacctgattaaggaaatcatggccttggctttagctaaagttgatgatgaaatgattaccaaggttaaagcacagggatatcagattgataagaagaatgagcgctcaatcaatatggcttttggcgaagttaggtatgtcagaagaagatatgtctgcccaggcaaacaagcaaggtatcccttggatgaattaataggctttgacaaatacaagcgctacagtattttagcagtcaaaaacatcttagaagtaagcagcgttgccacttatcgcaatactgctctagcagtcaattgcctgtctggctttaatattagccatatgcaggtgggcaatttggtaaaaatggccgggaaaaatattaaagcgggccaagaagcagattcaagatatgatgccgcaggcactaagaaaaaggtcccagttttgtatcttgaaggcgatggcgtggtgatcaaaggcactaaaagccggttggaatttcatcgctatcaggtctgtgaaggcattgtcaatataagcaagaaacgcagaaagcgaatcaatgccaaggaatttgtttctttaagccgacttgatgcgctgaacgaagccaaggagtacctggccaatacttatgatctttctgatactgtaattcttagcaacgccgatggcggtgctggatatgtcaaaacagacttcgatgacattgtagggctatgcaagcgtcatgagcatttcttggatgtctttcacctaaataagaaaatcaaagaaaggctatattttgcgcctgacctgcaaggcaagctgatttctgctttggaatacaaatacagctatgacaaaactatcctaaccactgcagaaagccgactaattgatgaattgaataccgagctcaatcatgattatctggggcgcctaaagaattatattgatcgtcattgggacgatattaagccgtttaagaaacgaaaactgactgtgactaaagccattggctgctgcgagagcaaccaccgcaagtatacctaccgtgttaaggggcaaggcaagaaatggtcaaaatctggagcagaaggcatgcttaggatcttaagctgcatcaagaatcgagagctggaattttggcttagcagcgagtttgaagattcagaaataactgtattgactgaacaggaattaaaagcagcggcccgtgacagcttaaagaagcgtcatgaagttcatttaggcatccagcatggcgcattaaccgcacaggtagctggcaatagttatttaagcaagctaagcagaaatttaagtcatataaatatttaagaaattaaggttagactaatggtttaaaggctaccgcaaaaacattgacacttactattgtacctactgttttcaatcatgagccggaataaggtataattaacactgatatactatatctattaggaaggatcttcatgaaggattttttacgtaagctagaattgcctgaatttattaaggattcacggctgacagcttctataatcattgcactttctctttcattattgggaagcattattgcgatgattatgaatccattgtttggtttggcaatgcttttagtctttattttgaccgttgcctttgccatctatgggacctatattttagcgggtaatgcaaatagctttgcggttaatttgtcttaccggataaagcgtagtgaacaagaagcaatgattaagatgccgttgggaattttgctttatgattcggatcaccaaattcagtgggttaatccatatctgcaattatatttaaagagtacagatttagtggggcacacaattgaatcagttgaccctgatctgaataagctacttaatgaagcaattgaggcaaaaacagcagaaaatcatctggttgattgggatggtcaccgatttgaaatggtggtccaaaataatttaggcgtaatatatttattggatattacgcgctatgccaaaattgaagataaatataaagctgaacgattggcgattggtcaaattttcatcgataattatgatgagctaagtgaagcaatgcatgatcaagaattgaccagcatgagttcatatgtgcaaaatacattgagtgattatgcgaaaaagtttaacgcatatttaaaacggattgatgaagaccatttcttgatcttgatccatatgcaagaattagctgagatggagaaggacaaattctctgttttagataaggtgcgtcaagaaacgagtagaaacaatacgccacttactttatctatgggaattgcttttgggagtgattctttgtctgaaattgccaaccaggctcaatctaacttggattttgccctaggtcgaggtggagaccaggttgtcttacgtcaacccggtaaagacgcccgcttttatggcggtaagtctaatccgatggaaaagcggactagagttagagcaagaatggtttcacaagcaattagtgaactatttaaagatgccgatcaagtttttgttgttggtcatcagcgtcctgacatggattcagtcggtagtgggattggcgtagtaaaattagctcgtcttcacggagttaaagctaattttgttttagatactaataagacaaactatgatgttggtcgcttggtcaccttaatgcaacagaaaaatcaggataaggatatttttattaaccctgatgtagctttagctcaagttactgacaagtcaatgttggtaatggttgatcattcgaagtattcaattacttactcacgggcactttatgatcgtttgaagaatcgaatcatcgttattgatcaccatagacgaggcgaggaattccctgaaaatccaatgttaacctatgttgaaccatatgcttcttcggcttgtgaattggtcactgaaatgattgaatatcagcagccagctaacggtaagcgagttttgaccgatattgaagctacagcaatgttagctgggattgtggtcgactccaaggaattctcgttgagaacaggaactagaaccttcgatgcggctagctacttacgttcaatcggggctgactcagcagttgtaagcatgctcttgaaagaggatattgatagtttcctcgaacggacgcatttagtagccactttgaagatggtgaagccacatatggccgtattatgtggacctgatgataagattatagatccgatcattacagcgcaggcggctgatactgcacttgatttgggaaatgtgggtgctagtttcgcaattacgcggcgcagtgataatacgattggtatttcagctagatcaatgggtaagatcaacgttcaaattattatggaaaaattgggcggtggtggacatctttctaatgcggcaacacagattaaagatgttactattgaagaagcaaaacaaaaattacttgatgcaattgatgaatatgaaaaagaaaatgattagggaggacaaatatgaaagttatttttactcaagatgttagaggtcgaggtaagcgtggacaagttaaggacgtacctgatggctacgcacaaaattacttgattaagcgaggcttggctaaagaagctactaaaggtaacatgaataccttgaagcgtgtagaagctaatgaaaaggctgcttatgaagcagaaaaggccgaagcagaaaagatcaaggcagaacttgaaaaagacgataccgttgttaacttcaaatctaaggctggtactgactcacgtttgtttggttcaatctcaagtaagaagattgtggaaggccttgaaaagcaatacggtatcaaggttgataaacgcaagcttaacttgccagaaccaattaagactttgggctatactaatgttcatgccaaattatttaagggtgttgaagctactattcgcgttcacgttactgaacaagactaataaaaagtggttgtgattgatggataatatcgtttctcaacaaattccgcatgatcgcgatgccgaaagggcagttctgggtgcgatttttatcgatcctgaagcaattgcggatgctagtgcggtagttcagcctgaagatttctatgagcgggctaatcaaattgtctttcaagcgatgttggacttgtctgatcgcggggatgcaattgatacgctgaccttacaggatgaattaaataaaagaaatcagttagaagatattggtggtatcggttatgtttctgaattagcgatggccacaccgacagcagcgcatgttacctattatgccaaaattgtgcataggaaggcgctgcttcgtcgtttaatctctgctagtcagaagattatctctaatgcaatcgatggctctgacgatgtaacagacattctagatgacgctgaaagtgaaattatgaatgtttcgtcagagaatagcacaggcggctttaggaccattaaagagatcgttaattcagcgattaatgatattaataatattccggatgacggaaatatggttactggcttgccgactggttttgcggaattagataagatgacaactggttttcacgatgatgaattgatcattgtagctgctcgtcctggtgtgggtaagacttcatttgccttaaatattgcgcaaaatgtagggctacacactgaaaaaagtgtagctatgttctcactagaaatgagtggagagcaactggttcagaggatgttagcttctgaaggactgattaattcacagcacttgagaactggccagcttgatgaagaagaatggcgtaaattggtagtggcttctgggtcactagcaggtgcgcaaatctttatcgatgatacgcccggaatcaagatgagtgaaattcgtgctaaatcacggcgattagctaaggaaaagggcaatcttggtcttattgtaattgactacttgcagttgattgagggaccacgtagtgagtcacggcaacaagaagtttcagctatttcacgacaattaaaaaagctagctaaggagcttcatgtgcccgtcattgccctttcgcagctatcacggtcagttgagcagagacaggataaacggcctgtactgtccgatattcgtgaatctggatcaattgaacaagatgccgacattgtttctttcttatatcgggatgattattatcgcgatgagcctaaagatggcgaaagtagtggcagtcaagatgaagttggcgcagaagacgataacggtgaagtagaagtcattattgaaaagaaccgttctggtagtcgggggacagttaaattaatgttctctaagccgtttaaccggttttcaaatttggattatgcacatgatcctaatggcaattaagattaatcaagtgtctgggaaaaaactaagtctcagatcatgaaaaaagaacgttgaatttttgtttcaacgctctttttgtatacttttagctccagccttgatattattaaatcatcacaaaataaaaacaaaaaggtggaaactaacatgtacaagaattatatcacaggtcaaactgctttaacacttaatctagattttgccattccggccaatcatttggctaatgtcatcagctggtttgtagattcaattccagaagatgttttagtaggcaagactgctaaaacgggccgcccagcctatcatccagccatgatgctcaaaatactgctttttgcttactccagaagagttttttctggcagaaagattgagttgatgctggaagaaaatctgccaatgatgatcttggctgaccagcaaaagatttcatatcatactatcaataattttagatcaagcagccatgccaatgaactgattaaaaagagctttatctacttcactaacctgttagaagatgaaggcttaatcaatgaaggtgctgcttttatcgatggtactaagattgaagctgatgctaaccgctatacatttgtctggcgcaaagcggttgaaaagtatcatgaaaagctgaaaggccaggcagttgaactttatgatgaattgattactaaagaagtagtcaaagaaatggaaaaagaaaaagttcaaactagtcaggggctaaaggaattagctcaagaaactgaagcagaaattaacaagctgactaaagagattgagcaggaaaacaaagccattcctggcggttcacctcgaaaagccaagcgacgtggactaaaaaagattctgcaccggctaagaaaagattatgtgccaagaatgcaaaaatatgaagaagccgaagagatctttgccggacgcaacagttattccaaaacagatcatgacgccacctttatgcatatgaaggaagaccacatgaaaaatggtcaattaaagcctggctacaatattcaagcagtcacgaccgatcaatatgtagttgattatgccatctttcctaatccgacagatttcaaaactttggagccggttttggatcaaatgaccgtgttggacaagtttgacaaaatcgtcgccgatgctggctatggcagtgaatacaattattcgatgctggaggaaaaatatccagacaagaagtactttattccctacactatgtatgaaaaagaacagaccaaaaagtataagaatgatccaactaagctaatcaactggtactacaatgaaaaagatgattattacattgatcatcatggcgtcagattcaatttcaaatattacagccagcgtaaggatcgttctactggtcaggtccgtgattttaaggtttatgaggcagacgagttccagctaacgccagaattggaacaattggctaaaacagctagcggccgccagcgccaagttcgctataatcctaactggcaatatttaaaagaaaaagcaaaagaagttctccaaagcgaagaaggcagacacatctatggcatgagaaaatatgatgtagagccagttttcggacatttgaagaacgtatttggcatgcgcagaacgcacctgcgaggtaaagagaaggtcgaaaccgatatcggaattgcctttatgatgatgaatttgaacaaatattgtcaaagaaggtggctgaagggccgatttttattgttaaaaattttaaagagaacaaaaaaacgatcaagattcttaaaaaaggaaatcttgatcgtttttattcatctggaagctagttttttcccagacacttttttgtacttaaataaaacacaaacaatatttgcatagtattgtactataatttatattttatattgaaagtacacttaatatttgttataactaatattgaaaagatcaaattacgaatatactactcatggaggaatagcgagtttatgaagtttaagaaaattttgcttggtgcgtgtgcagttttagcagtcgtttcactagctgcctgctcaaatagtaagaagagttcatcctcatcgaatgaacctaaggaattgaacgttgaatttgtaccaagtacccaagcaaataagatggaagctaaggccaagcctttaggcacattattgcaaaagcaattacacattccagttcacgtaaccgtttctaccgactatagtgggctggttgaagcaatgtcatctaagaaagttgacgtaggctttatgccaccatattcttacatattagctcataaaaagggaattgctgatgttttattgcaagccgaacgttacggctatgatgaaccatccggtaagatgaatcataccttaatgcataagtatcgtggtatgatcgtggttaagaagggctcaaagatcaaatcttggaaagacttaaagggtaaaaagattgcgattggcgatcctagttcttcatcgggctatgtttatccagttgcggaactttacaaaaagggtttgaatgtaaccaaggactgcaaattagttaatgttaagggtgacgatcaagaagtgttatccgttttgaatggggatgttgatgccgcattcgtcttctcagatgcacgtaatattgccgctaaggatgacaagaaagcaatgaccgatgttgtgccaatctactttaccaagtggattccaaacgatactattgcggttagaaaagatatgcctaaaaaattcagagttaagttagctaaggctttcaagaatattgctaagtctaagaagggtaagcaaattatcgaaagcatttataaccattatggttacgttgaagctaaggattccgactttgatggcttacgtcaataccaaaagattgtgaacaaggctaccggtggtaataattaagattaaaaaagcactcactaagtgctttttttgtattcatgctaagatcagttaaaataaataaaacactaaaagcaaaaatgaaaagagaagaaaaaatatgaaaattgctgttttaactgatagctcagcttatttaactaaagaacaacaagaaaaatatcaaatcgatgttttgccaattccaattatttggggcaaaaaagtatatcatgacttagtcgatattggttatgaagaattttatcaaaaactaaatacagcaaaagagctgccaactacttcgcagccttcaatcggtgatcttaagcagaagattgatgaatacgtggcagcaggctacacggatgttattgtaattactctttcaagtgggatttctagctatttctcaaccgttcagagtgttgcggcagaagaagaccgaatcaaggttcatccattcgatagtaaaattacctgtgctggtgaggcggattatgctatgttggcaggccgtttaatcgaggctggagcggatattgatttgatcatgcatgatcttaaggacctgcaaaaaacgatggatgtgcgctttatggtggacgatttgagccatttgaagcgtacaggtcgtttgtctaatgcggcaagttttgttgggacgctgtttaagattaagccgattttatcgatggatgtgcaaaatgaaggccatatttcagcgattgcgaaagagcgtcaatataaacgtgcatacaagcatgtgcaaaatgattttgataatttgactaaaaatatgccgtataagattcaggacacaatttttgattcacttgatcctgagaaaaaacaggcctggcttgatgattaccgagctaagttccctaagtataagtttgatactagtattatcggccctgttgttggggtgcatgtaggtcaaggtacaatgtcgatgatctggtgccgtgatttggatacttattttgatgaaaatggtcagccaatcaagggaattgagtcacaagcagtagtggatccagagtaagcataataccgatatggcaaaaaaatgagaggcactattgattctttaatatcattgctatattattattaataatttaatatggcgatgaatagggatgatcagagtgtcaatcagttctttttttaaaaagttaatagccaaaaataaactcttgtttttagctatggtgattactagtgcttttgcttctttagatggcgtcatttctccttatgttattgggaaaattactaatacactttctcagaaacattttagtgagataccgaaaatcttgttactgtatctgttgatgatgctttttctgaatgttagcttttatctatggcaattttgttggggaaaaattaccaaatcaagtaatgaattattgagatctacagcttttaataattttattgcttcccctagtgaaaagaaaatcactaataccctgaattttatcaatgttaatgttaaacaaattgaaaatcaatgtattgattcaacaattatgcttgtttactgcgttgagcaagccatcgtttcattagtttatattttaagtattaatggcattgcagcaatggttttcttagtttgtgggttaattccatcagttattccacgtttaactcgtaattgggttcagacaggaactaaaaagtggaatagcagttatgaaaactataatcaaaaaacaagtgatgctgtgtatggttttgatactatcagacatgcaaatggtgataatagattcaaaatatttgtccaaaaagcattaatgggagaagaaaagaagtattttttgatgaattttcggcgtaatacttctaattttttagcccaggtctcttattcattatcaatggttatttctttggctgttggtacattctttgtaattaatggtcaaattctagtaggtggtttgatttctctatttttagcatcagatcgtttaactagtccaattatttcgattgttaatattgcaaatcaattgacctctgttagtcctctgctaaaaaataaagctttacaaaaatctaaaaagcaagaatttaataatttagacttcaccaaattaccaaaccaagagaaaataatttttgatcactgcaatttagggtattctaataaagctattttgaagaatattaatttgacagtttctaaaggcaataaagtattgatcatcggtcgttctggtattggtaaatccactctgttcaagacattgcttaatgaaattccattgctaaagggcaaaatactggtagataatagtcttaaccaagctaatttctataccaattttggtattgttagtcaggatacttatatattcgctgaatctttgcgctttaatttaacgcttggaaaagattttcctactcagcaagtaataaatgttttgaaaactgttaaattaagttatttagctaatgaaaaaagcttagacatgcagatcggggagaagggattatcactttcgggtggagaaaaacgaaaactggaaattgcacgagctttattgaatcaaaaatcgattttacttgttgacgaaggactatctggacttgatgaagaaagcaataaacaaatttttgcacttcttcaaagtcttccgcagacagtaattgaaattgaacatgctgttagtccagaagagaaaaatcaatttgatcaaattattgatctaggagctcagtattgatttttttataaataaacaaaaacaattacatacgtatgaaagcctttacacataaagacttttttatttataatattagcagcacgaaaactttttggagaaaaacttacatacagaaaaggatgagaatatggcagaaaagaaatatgtcggcagtatcgaagcaggcggtactaaatttatcgtagctgtgcaagatgttgaaacaggtaaggaagtagcgcgtgatcgtattcctaccactactaacaaggagactttacaaaagactgctgaatttttcaaaaagcaccccgttgatgcattaggaattggtacttttggtccaattgatatcaatcctaactctcggacttatggttacattttggacacgcctaagccaggttggtcaggtacagatgtgaagggcttctttgaaagaaaattaggtattccagttgccatgacgactgacgttaacgcatcatgttatggtgaatatgttgctcgcggtcgcgatgattctaagagctacttctatgcaacagttggtactggcgttggagctggaattgtgcaagcgggtaagttgctcggtttgaataaccacccagaaatggggcacatgttggttcgtcgttatcctggtgatgattatgaaggccattgcccattccataatgatgcttgtgttgaaggcatgtctgctggtccaagtcttgagggcagaactggtatccctggtgaaaaattgtctcgcgataacaaggtcttcacttattctgcgtattacattgctcaaatgctcttcaatgtttacatggctgctcgtccagatgtaatgattgttggcggttcagttttaaatgaagatgatttggttaaggtaagaaagttctttgatgaatttaacaacaattacgttgccacacccgatttgaatgaattaattgtgcgtcctgctgtggctcacaacgggtctgcaactcttggcgattttgaattagctaagaatttgctcaaataaaaaagcatagataaattgaataagcaataaaaaggctcaactcgttaagaaagacgtaaggcgagccttttttgacgtaatttgacctaaatgcgcgtaatattaattctagaaacgtaaccggtttattaagaaaggagcccaactatgaacaaatcagatagtggcttaaaagacaaagttatcggtaaagtgaaagaagtcgaaggtaaaattaccggcgataaatcacgcgaagtccaaggaaaagctcaacaagccaagggcaaagttaaggacaaagccaaaaaattaaaggatgatctggaaaaagaccatcaaatagatgaagattgttaaagactcaggtcgactagcaatagctaaacagaaagcaaataggtgatcctatgttatcatggatctgggttttaatcgttggcgctataataggtctaatagctggtttcataaccggcaagggtggatcaatgggatttctagctaatttaatagcagggctggttggttcaaccttaggccaagcaatctttggttcgtgggggccgcaaatggctgggatggcaatcgtaccatcaatattgggagccgtcatcttggtactagtggtttcctttgtactagggatgcttagaaaaactgaataaaaatagaataagagaagtgtctgggaaaaaactaacccttagatactgaaagacgatcaatccaactcttaatttgagttgcttgaccgtctttttctgtctatttttatttttgaacaaagaaaattggtcttttgaccatcttctgttccaatatttgcttaaattcatcatcatgaaggctattcctatatctgtttcaaccttctttttgcctcttaaatgagttcggcgcatgccaaagacgttcttcaaatgtccaaaaatcggctccacatcatatttcctcatgctgtagatgtgtctgccttcaggactttggagaactgctttggctttttcttttaggtattgccagttaggattatagcgaacctgacgttggcgtccgctcttagtcttggctaagcgttctaattctggcgttagttgaaattcatctgcttcatagaccttaaaatcacgaacctgaccagtcgatcgatctttacgttgactataatatttgaagttgaatctgacgccattttgatcaaggtaataatcatctttttcatcatagaaccagttagccagcttagtcggatcgttgcgatgctttctggtcttttccttttcgtacatggtataaggaatatagtacttcttgtctgaatactcttcttctaacattgaataattatattcgctgccataaccagcatcagcgacaatcttgtcaaacttgtctagtgtcgtcatctgctttaaaaatggttcgaaagttctgaaatcagttggattagggtataaagcaaagtcaaccacatattgatcagtggtggcagcttgaatattgtagcctggcttgagctggccgttcttcatgtgatcttccttcatatgcatgaaagtcgcgtcatgatctgtcttagaatagctgttacgccctgcaaagatttctttcgcctcttcatatttcttcattcgaggaacatagtcttttcttagtttatgaagcagctttttaagaccgcgtcttcttgcttttctaggcgaaccgccagggattgctttgggttcttgctcaatttcttcggtcagcttttcaatctcggcttccgtttcttgtgctagctctgccaaaccttgactggtctggactttctcttttgccattgctttgacgacttctttggcaatcaattcatcataaagctcaaccgcttgacctttgagcttgtcatgaaatttttcaactgccttgcgccaaacaaaagtatagcgattggcgtcagcttcgattttagtgccatcaataaagatcgctccttcattgataaggccctcggcttctaacaaattggtaaagtagaggaagcttttcttaaccagctcattggcatgcttgctggatctaaagttattgatagtatggtaagaaatctgttggtgttcagccaaagccatcatcggcacgttttcttccagcattaattcgatttttctgcctgaaaatactcttctggaataagcaaaaagcaagattttaagcatcatcgctggatgataagctggacgaccggttttagcagtattacccaataagacatcttctggaattgaatcgacaaaccagctaatggtattagccaaatgattatgaggaatagcgaagtctaagttgagtgttaaagctgtttgacctatggtataattttgatacattaagattgccttctttctttttgttttgtggtgattcaataatatcaaggaaggcacttaaagtatagaaaaagaacgatgaaatccattaggaaatcatcgttcttttttcctgtctgagaattagttttttcccagacactttgtgtttcatgtgaaactattttagcttttttcgttcattttctttctcagctaaaaaacgttgcttaatttcttcaggcaaaagactagggaccgtcttgtcataaaattcaaagaatatgggtgccttgttagagtcattgctcttgggatataaggcaaagtcactttcgctaaacggtaagctgatattaccacgtaaagcattgataatctcaccgaacatatgcaaaacataacggcgcgtctcaggctctaatgacatgattacgcgactgaaacggacagtgcctaataatttatgggcagtaatttgaaaaatatcggtaatatttaattcatcaaatgcttggaaaagagcatcccataattcaccacgttgcttttcagggatgctgtggttaaagtcgatgaagaaatgccgcaaagaacgtgcacctgaagtaagtccttctgctagaacaaaactatcacggccaacagaccaacggcgtggatcatgttgctggaccatcggtgcagtgcttttgacgattaaaacgtgttcaggatgatcaagcatggtgccaatgattgaagcttctgggaggtaggtcttcatcttgggtaatgcacgtacaaagccaggtgctttccagacttggtggaaaaagccggggccgtcaaagctaaaggccttgataatacggtcctgcaaatcaggctcagcgacacttaaagcatattcagcgtaattgccacctttagagtgacctgctaaatatattttgtcgtgaggaaattccgcagcaatttcttttaaataatgagcagcaacatcttgcccatagactttaggcatgtagttcatgttcatatcttcgttccagccaattaatgaactgtcagtgccacgatagacaataataattttattgtcagttagtcgaaaagtagcagcggtgaattgcaaaggatatgggtctttttctaggcgattagtccagttaagaatcttaactttgcccaagcgaggtgatttgggcaaaagcagaacttgatcaccagctaaatctttcatttgtacctgaaatgaaggtagtacttgcagtttttcagctacttcgcttagggtgtgtcctttggcagatttgtcgacgggcagataaataatggaggcgaagagagagacatccacactattgaaaggacgctctttaaaagaaagatctccacgccaacgtaaatattcaagtgttccggccataatctcgtcctttctttcacttttagcaataatactattctactagattattgtggcaaaataaaaaatctcaggcgaatgcttgagatctaaacagaattttaaataccaccacgcgtatagctgatgcgcgtaatatctggatacttacgtaagttcatgataattgaattttcgtcaagtttattattgataaccccatcaatgtagaaaactatccgatcatcacttacgtctaaaattttgatagtaatattttcaactttattttctgcaagttcatgtttaattttagacaaaatgtggtgctggttaatagccacaatttgaatgttaaaacgaacatgtggcgttattttgttgataatgacatcatcgtgaaagatcatttgaatgataaacaatagggcggttgataggataccgatgaaatacatgccagcaccaacagccatcccaatggcggcagttgcccaaactccagcggcagtagttaagcctgagacctgttcttttctaactaggattgtacccgcaccaatgaaggaaattcctgtaacgatctgggccgcaattcttgatggatctagtgcaatgtcatgcatgcttaatagatcggtaaatccatatttagatacgatcatgaataaagcagaagcaatcgcaactacgatatgagttctcacacccgcgctttttctctgaatcgcccgctcatagccgattaatgcgccacaaaaagctgcgacaacaattctaagtagccaatctaattcggttgtaattggagctaaagtttgcattatttagtcctcatcctttgtataatcaacaattattatcatttctattttaacgtaaatgcagaaaaattatagtctggggaatttttttgaacttttttcaaaaaagacttgcacagctctcgtctatgtggtttaattaatactgttgtcgggtgagacaacgaagagttgctgacttagctcagttggcagagcacctcactagtaatgaggaggtcggaggttcgaaccctctagtcagcattagttaaacaatttaatagtttttaagtctatcaattaagttcgaaagagcttgatatgataggcttttttgttgtttctagatatttgtgtagatttaaaaatagttatgaatatttagtttcaccacaaaaattgccacacagtttttctagtgtggcatctgtgtggcaaaggttcgattaatgttgtagtggcgggctttattgcttgccatttttttcgttttcaaagtatccatgatttaagaatgactgtcgatactcttttaagatttttatttgatggtctatggcaggaactaacgtatatgcattatttttattgtagaattcatccattaatttagtattcgattccttgtagtccttaatgaaattactatcattttgattcataataatttcttctaactgcatacgaataactaaattaacattattaatcatttcaagatcattggcaccttccaatgattcttcaaattttttatcaaataaaaatttgaatttatctttccaaaaatttattacgtatgatttctttttataatcttcatcatttttagtaaaagaatcagcggtatctttatctccatttatagaaagaaagtgagaaatattatttttcatattactcaattcttcattattatcataatatgctgaaaaaagtaaattaattaacttactctctacttcttcacctctaattccttcgccttttacataagatactggaactttaaatatttctgctaaagctttccatacctcttcatttggaattctgcttcctgcttcgtatcttgctattgttactcgtgtagctgatatgtttttgttctttaaaagattagatagatcttgttgtgtaaaataatttttttctcttagttctttaattcgatttggagtcatattattacctcactaagattaattttatacgattggtacataattagcaaaagtaccaattttggatacaaaagtgttgactacaagaatgaataattgtatattatatgtaaccaaatgtggtacacaaaattataaataaccatttttggaaacaaaaaagaaagagggaatattaaaaatgtccagtaatgtaacaaagcaaggtgaagtactatctaccttcaacgaaagtagtagtaaaagaaccccaattcaatcagcattaacaagaccgttggttgaagcaattggtaagtgttttctattgttgagcggaaccacagaagaagttcaagatcctaatgatgagtctaaaactattccgcgcgcagtatacgaagtaagagttattagctctaaaactagattacctattggaactgtgctaacggtgaaaattaaaggaggtaagagtgtaattactgatgaagagaataagaagttactgttaggcttagagaaaaataaggtagtagcattcgacgatctaagtcattggaactttaacggaaatgagggattatcagcttcaggtatgcgagtattagaagtcagtccgcaagaggctatgaatttatagaaatgaggcggcttatatgaaaataaaaaaattagtcttagataccaaaaacccgttaggcaatcctaacggggtaaaaatggcattaggagtaactttattatcttcaattggtcttgagtataaagttgcacctcaattcataaatgctggtaattataccgcattagcttatccatttttaattaatattatacctctagggtatccatgctggaaatgggttaatctccatatcgttaattataagatctataagcaattgatgaatattgttcattcggaacaattaatagactatggagataaaaaagaaactaccactttcggtgaaagaaaagttgaatatggtgtcaagatcgtctatgaagaaacggcagaaggtacatatattactgtatatcctaatggtataaaacatagcgacgccactcagacgctaaacaataggctagaggaaactttcaacatgaatgttttatcggtagatcatcagctagcttatacgaaatatttattgagaaatgtaaacagacaaagaatggaggtttctaatgataacttctaatttcgtaataaatcttgataagaatacatcattcagttttaaaggtagtggtgggattcttgtcactgggagaagtggctcaggcaagactaataccaccacatatataatgctgaaggcgatgtcccaatgtgattgcggtttatatattattgatgcaaaaagagctgatatgtatggacttcatcaatttttaaaagatggcaagaaggtagtggcaagtacaacaaatcaaatagcacgattgttgcgtgttcttaatgagaacatgagcgcacggtatgagcattttaagaatggaaaatggggacaggatttcgctgaatatggatatagaccatatttattagtcattgatgaagtatctgcgatgttggctggggctggtaagaataagaaagaaataatgggtgaattgcgtcaagttatccttcgtggacgacaagcagggatatttacccttatttcagggcagagaattgatgcaactattttagatcgtgatattaccttacagttaggtacaagaatcgtgatgggacaagcagattcggagacttatcgcatggcttacccaatggtaaatgatattaaagcattaccattagtacctaataagccggggtatggtcttatctattcagatgggcaaaaaattagcaatcctactccatttgtctcaccggatatgtctaacattgatgttccaggggtaattacgaggttagagaataattttgatccatctaaatatattgatgaatcaagctattgggaggtttagtaattgataagttgccagctggcgggcgacagagtcgcacgaatggaatgtccaagcgtgagcgggctggcaacacccaactaataatatgggtgtaacggaaagattattaatcatggaaacgatgaataatattaaaattgatcaacttcgtctaaatattccatatgatgaaatctatcaagtagaaaatagtcaaagtttacccaaagaagttatagtagctgataatctgctgcatctggcatggttgtttaagtctaatacagtgagtcatggacataatggctatacttcttcatataatttcggttcaggagaacaaggcggaaatatttccgtaatgtggaacgagtcaagaaaagatatgggaatactagtcgactttactgcgacaggcaaagcgctatatgaaagccttgctgaattacatggaattcctgttaattggaagaaaataattgaagaattatatgaaaaaatggggcatatatcgaggctagatatagctactgaccttattaattatggtttttcagttaacgaaattattcaaaggttaaagaatgaagaatcatttttcttgaatactcaaggaaataaaatcaatgctaatcgatttaagataattggaagctatagtgaagctcagactctatatatcggtagtagaaaaagtgatgcttttctgagaatttatgataaaaaagttgaacaggatcgagccgatggactctatagaaacttggctagaaactgtaacgattggataagagtagaagcagaatttaaacaccgtttagctaaagaactaggaaaatatattacaacattaactgcagataatatttatccttatttacttggctgtgtactagaacgttggtcattagttgatagggaagaataatgacatatgaaaaattccaatattctaaagaatggaagattttaaaagagttatcgaaaggacaaggacttcaagaactaaaacaagctcaagttgacgcttccctgaatagaaaaattaattggttcttgtatggtggtgccagtggagttattacgttgattaaagaaatttatggtgatgaagcactaaaaaagttttatcaatttttagattattttatttctaatcctgatacgttaggacattactaccactcggacaagataaaggcggatactaaaactattgcagattctacgcaaggcttgaactttggagaatatttagaagacttaaagagagaattagttgagggagataaacagaaaggcaggggctaatatgtttggcacagagttactcaacgctagacaaatagcagaagaattaggtattagctatacttacttttttaaattaattaaaaatgggtgtccttatcatcaacttggagaccaaggacgtaaatattacgttttaaaggaagtacaagagtggctattagtaagtagccaacattaattagaagacgtagcaacttgctacgcttttttaggagaaagctatgtcaattacacaaattaaaacggggaaaaataaaggaaaataccgtgttagaattcaacctactgataatgaaacaggtaaaactattccgattcctagtaaagtaacaaaaactagcagtaagcgtgaagcaaaacaattagaagaacaaatgtgggtgcaatatcgcgcgcataaagaaatgaatttaaatgtattagatcaaccacttgcaaaagctttagatcactatgtagaagaagaaagaagttcggggcgttggtcatcgattactacgtatgataattggaaatatacggttaagcttgtttctcaatatttcggaaagaaaaaagttaaagatatcaaagaaaaagatatgcgtagttttgctagaaattacataagtacacataaagcaactgtggcacctcattcaacgctagatagacagttacaaaatttaaggagttattttgctactttgaaggaatatggtgtcttaaagaatcctattcctatgaagccattaactaagttttttagacgtgatgaaatgaatgcccctgttaagaaatatgttttcactaataatgaaattaatgttcttaaagatagaatttatagagagcttggagtaacaagaataagttattggacaactagaattgctatcttgatagctctagatactggaatgagacctcaagaaattcaggctttaaagtggagtcaaattactaatgatggaagttttaaagtttttagaataaatgactcatggaatgaaaaagagaagcatcttaacggacatttgaaaagtcgaccgcatggagaatctagactaacccttcccctttctgaaccacttttgcagttattgaataagtttcgtcattgtcagttagaacttttaaaggagaatggtttaactaattttaatgatcgaattttattgaacatcacagattatcacttgtgcgcattagggtatccaataactcaaaaaagtatgaatgatatgttgaaacagttgagtaagaaagtaggggttaataatcaaaatttaaatataagtatgtatacttgtcgtcatactgtagcaacaaaattagggaatacaccaggcatgtcttacccttgggcggcaagcagattagggcattctttaaagatgtttatgcggacatatgtacatgttgatgaagatcgaaatgaagaaatgcttagattgatagctaaaagataaaagaaaaatgcaaaaataacttatatttgataaaaaaatgaattaatgtagtaatagcaagaatttgaaaataataaataacaaataatttttaacattttatagattttgaaaaaaaaagagcgtatactcagggcatcataaagagatgtgaaggagaaatcaaaatggttattgtagaacaaaagtttaataaatataatcatacaagcaacatggatgctatggagtacgctgcaggatgttgcacatgtacaacaacaagttgtacaacttcatgtgccgctgtagctgaaagttaatggatagttggcgctgtaaattatattacagtgctttttttaggagtataaatactgttatgtgtctattaagaataaaagacttaaaagttaattttaaggatcaaacagtactggattttagaggtcatgatatagagataaagtcaggagacaaagtagctctaattggaaaaaatggggcaggaaaaagtacactattaaattgtcttttacatgaagtaaaatacactggctgtataaaggagaagtatcatcagtcggatataggagtagtttttcaagaaaatgtatattttaaattcttgaaagtttatgaaatctttgaattagtgtggaataaacctaaaaagttaattttaaaatctaaatttattaagaattttaatttagcaagcattatgaataaatacatttctgacttatctggtggtgaaaaacagagattaacaatagctttggttttttctcaaaataaaaagatttacttactagatgaaataaattccggcttagattatgataacaggcatgaattaagtaaaatcataaataatattactgaagaaaaaacagtaatacaaataagtcattattttgaagaagttgaaaattgggctaataaattgataatccttgatagaggcaagatgatatattttggaagcttatctaagttttattctataaataagcatgattcattaattattataaatgataaaaaaagcctatctagactgacccaatgtcattaagttaagacattgacaattaagggtgcttttttagagatcgaatcatttggattcgatctctttttttgtataaaataaaggcgaaaagaccagccttttcgcctatcttatatattatatattttaaaccttcaaaattattgccagaaagatggtgttaattatgaaagcccttcataagaatattctagaacgtcttgatcaaattatcaataatactggggatcatattcacgattttattaataatcctcatgcttttaccaggaaacgcactttagatgcagcgacagtccttaaaactacaattaacatgcaaggtcagaatttaaacagtgaactctttagagcttttggcgaagatgcaactaaaaagaacgataaagtagttagtacttctgcctatgttcaacgcaaaagccagctttctcctgcttgttttaaacatattctgactgtttttaatcaaaatctatttaatattcaactttttgatcatcactaccgtttgtttgccattgatggctctgactttaatcaaatctggaatccgaaatcgaataacattgtacaagcttcttctcataaaaagaaaccctattgtcaaattcacgttaatgccttatatgatctattgaataatacctaccaggattgtatttttcagcctaaatcagaaatggatgaacgcaaagcggctgttcaaatgcttaaagctttgaattgtggtccatatattgtaacaatggatcgtggctacactagtttcaatatgattgaaaactgcaatcgcctgcctaactgtcattacataatacgaactaaggctggacaaggcggagttaaagaaataacgacattgcctgatcaagaatgtgatcgtgagatttcctgcctggtaactacttctaactattactacatcacgcataaagccagtgagaatattcaccatgtccagcatcattatcgccaatatattaagtatcgctctaaaaatacccaggatctaagctgggattttggcgagttatgcacaataaaatttcgagcctgcaaatttagaattaatgatgccaaatcaggcaaagaagaatgggaagttgtgctaaccaatcttgatcgaaaaaattatccgctaaaaagaattaaagagctttatcatctgcgttggggtattgagacctccttcaagaaattgaagtattctttaggcagtgtacagttccattccaaacaagataaatttattgaaatggaaatttatgcccatatgattatgtttaatgcaatcagtcaaattgatgcacaggcctatattccgcaaaagcattgcaagtatcaatatgccatcaatttcaagcaatcatgcttgattattcagagcatgtatttggcttcttctttaacgcaagattttgaacggatccttattcagatcagctattataccattccaattagaccaggccgcaaggacaagagaaatattaagcccaaatcagctgtatattatttatatcgcgtagcttaaaaaagcagaatctgtgctatgccttatttgttgtacgaaaaaagcaccaatttaaccaattaaatgttaaatcagtgctttaaaagtctaatattaattgtcaatgtcttaacttaatgacattgagactgacccagaagcctttaaatctttatagtaataaatatattgtatctagtagtattgatgagagacatgatataacaaatttattagagcaacaaaagatagattataaagtggtgccacaaaatttatacacaacttataaattagcattagtaaaacatgaggataggtaaaataatggctagagaaattttattaagtttaaaagcacaacttagagttccaattgctgtatttttttctattttttttccaattattatgatgattatgatgatgacatcttacggtaatttttcattaagaaatggatatcactttatagataagtatttttttattagtactactataggtattctacctctaaccttaattagttttcctattgatataaataatttgcttgaaactaagcattacttacgtttgaaatacttaaatgttgatttaaaaaaattatttttatcaaatattatttcttatttgataattgtatttatttcagttggaataaatttaatagtaggaaaaagtatatataatttaagattacctagtatagagtatttatgttatttttttattcaattattctattgtgcgatagttctacttatatttggcttactgttaagtttaatagtatcagatatcaaagctttaatgcctgtaggaatgactataatgtttatattatttatggttataggtgtttttgtacagtatagctccttaccgaaaattatacgtactatttctagctacataccagtaaaatatttggcaaatgatttctattatatctggattggtcaggctaaatggaatatgccattttttaaatgtaatacgatctggcttatttttctgtgtttgatttgttacataatttatagaaggaagaataatgttacgaagattttcaactagtaaggatttaagaattgggatagagataatagttggaatcactttatcatttatcattaattttataatgatttcaattgggtatgccattacaaatagtgaaaaattaaaagaatattcggtcaattattttggattagtcatatataaaataaagaattatggaaataaaggtataccagtttccaataatatgatgtttatcggaatagttttaacaataatatttgtttttattgtagagtgggttgtatataagagggataagaatggtagagtatgagcttaaaggattatttaatcaaaatacgctttcaacatcagatattagtaataataataattacaataatcaacaattatttgatcatattataagaggaaatgctaattctgagatgctgacatacttacttaatatgaaccatcagcgattgaatgattttaagagtatgcatcaatataattatggaaattttgcatccttaatgaacagtgtagaacagtataacgaaatagaaaatgatgaaactattttgctacctaagccattgagaataaaaaataagttacagcaggttctaaagaaaagaaaaagtgttagaaattatataggcttatcatgtgatttacgagaattgtccacaatattgatgtattcatttggaatctcgggaagaaaagagaattttggtggaatagtcgcaagtatgcgatattacgcttctggaggtgctctatatccaatttcagtgattatatatataaataaggtggatggattgaaaaaggggctgtatttatatcagccaatgtatcattccttattaccactaaatattaaaactcaaatcgatattaataaattatttgtaggaagtaacattgatgttaaaaatagtagcttttttgtattttataaatatgcgattagttctacatatttaaaatatggtgagctatctttagctaatattttgattgaagcgggaatgatggcgcaaaatttttccttagtaactacagcatgtggttttgggtcatgtccaattgcaggatataacaaaagatttattgaagatatttgtaatttagatcatgttaatgagcatataatttttactgaaagttgtgggagaaatgaatagcgatacgattttttttgtaaaaaaagatacacatattaattctaatataaacgaatggatattaagtaagggaataattcataaaagcactttaacaataagtaaaaatgaaagtagtactttgtttgtaagtttattcaagcaattaatacaaaatcaggaaattaaagttagtgaagatgatgaagagtattcagactttaaaaaacttgttcagcttggatttttaggaataagaaataaaaataaaaaagtagcacttattgtggaagaaagtgcaaaaaacttctttgaaaactatttaaaagatgaaaatatatgtgttagctcattagatgagtttataactcaagatacattaaatattttaattgaagaaaaaaataatactaaattaaataaaatagttcaaaactataaaaataaatacaaagatgtagatttgatttttgtttgttctttgtattatgaaaattatttaaaaggaatcaacaagctaactaaattaattagtatcccatataatataggattttatgataataataatatatttgctactagaataatacatggagagactggctgctatcaatgtcttgaaaatcaaatactacaaaaatttgatggatatatcgaagattatgtatcagaaatggattctgaaaaacaagtatttgatataaaaaattatggagtattaatatctataattaagtcagagatagaagaactaaatttatactctgatacagagctacgaggaaatgttcttcatttttatttacctacttatgaatacaattttgataagaatagaattcaaagtgattgctcagtttgttctactataaataatattttatttaaagaacaaaatatgaaagcgtgcaatattttagccgaggttttaggtaatgataaatatcaagaataatttagaatataatttattgcgtcaacggatcttgggtggcgctataactggaatctggaaaaaggatactttctttattggcgaaagttcgtatccggtaatgaattataattatattactgcaaactttactaattttgaaaaattcgcttttcctggctatgttcccccgattaattatcatcttagtggctacggcttatcttataataaagctttatcggcttttctaggtgaaagtacagaaagatattctttttcagtcttatatcaaaacattaagcataatatcatttattctgattatcaaaatcttcagaaaaagtattctaattgttatatagtacctttaaattatattaatatttatttttcaaaagaagataaagaaaattatataactaaaaaagatccaataagatggatagcattaaattcactatttgatattaataaaaaggtactagttccgcttcagttttatattatgtataccaacagtatatttaaaaatgaaaaaagaattgtaaatagtgctacatcaacaggaactgcttcgcaagaaagctttgataaaagtctggaaaatgccatagttgagttcttacaaatagattcttttaatctttggtggtatggaggtctaagaggtaaaaatttaaatattgatacagaaggcttattaaaggaattgttcccaaacaataatagactttggatgtttttaaaaaaatttacggttaattttatagatattagttttgacaaagcaattaatgtagttgtttgcgaaattaccagtaatagtgatagtaaactacctaaatatgtagtaggagttcaaggaggattttgtttaaataagtgtattgaacgatccttttttgaatgtgtaactgttttagaatattgttttactcaaagttgggttgaaggttctaaatttaaaaagatttctacaaatatagatgatttaaatgtaaataatttagacgataatgtattgttttatgctaaaaatggaaagcctaaattaatcaaaaaagagaatattttaagagtgtccaaaaaggttactaatttaaaagatttgcttttgaatttaaagagcatctctaagtatgcaggatatttaaatattacgcctccagaatttagaaatcaaaactttgaaatatgtagagtatttataccagagcttttaccaatttctttaccgtcttatccgccttattatcatccaagatacagtaaaataggaggtattattaataatgtcccccatcctttggcttaaaatagcttttttcatcactttgtttccaggcggaatatatttgataataagaagaatattgtccagccatagaaaaagcataacagtatatttaataaccttggtaattgtagctattgtaaataccattattttaaagatcaattttaataggtatattgaaatcatcttaatattgattattccttttacgtattatttttttggagactgtaaaatagtttgtgtaaggatgaatgattccttaaatttatttctttaaacattagaaaaaggagttcctttctcgtatgattggtttgaacaaaaaaacacatacagaaagaagaactccttcatgaatgattttaccaaagattttgctcaagctctattcaatccagacaaaataaatgatttattgcgcaaagagctacaacaggctgttaataacttgctagaagctgagttgactgcctttctaggctatgatccctatgccagaaatggctggaatactggcaattctagaaatggtgcttatttccgcaaggttgatacccagtttggaccaattgaagtgcaagtgcctcgagaccgcaacggtcagtttcatcagcacacgctgcctgactacaagcagcactctgatgttttggaaagcacgattatcaagctatactccaaaggcgtaactaccagagaaatcgctgacttgattgagaaaatgtatggcagtcattatagtccagctcaagtatcaaatatttccaagcagatgctccccaagattgaggcttatcacaagcgcaagctaagcgacaagtttttctgtgtctatttggatgcgacataccttcctttgcgccgagaaacgtttgagcgtgaagcagtatatattgccattggcattaaacctaatggacataaggaagtcattgactactgcattgctcctagtgagaacattgaagtttggacagagatgcttcaaaacatgaagtccagaggcttgaagcaagttgagctttttctttctgatggtgttgttggcatgaaaacagccttggccaggacttatcctaaagctcattttcaacgctgcctggttcatgtcatgcgcaatatctgcgctaaagtacgcgtcgacgatcgtgaaaagatcatgaacgaattcaagcagatacatcaacagacaagcaaaaaagaagctgcagctgtcttgcacaaattctatgccaaatggaataaagcttatagccatgtcatcaaaggtttgaaggaaattgagcccgatctgctagtcttctacaattatcccaaacaaatcagagcttcaatttattcaaccaatatgattgaatcctttaacaacgtcatcaagcgtaaagctaagcctaaggcagaatttccaactgaacagtcgcttgatgcatttattggcatccaggcaatgagctacaatgaccgttatttcaatcgaattcataaaggctttggtcaggttcaggacaccttagaatcctactttgattaaataaataattaaaaaatcaatttacgagaaagatctatttacacaaaagatttgacagtttctttttttgagtatgttataaggtataaaagattcaatatcttaagttttaaggctaataaaacaattatttatgttttagttttttttcctatatttgaagaagttgtttaccgtttctttatatttaaatattgttcggttttaggcttttctggaatacaggctatgatatttgcaacgttatgctttgaattttcgcacatatattatttaggctttaaagctattaataaattatttttttcctttattcaaagtatgttgtttttggtttttcaaagtttattgttaataatatgtttacacataatttttaatttatatgtgtatttacacaaaaaagatatgtataaagttattttttgatattgacttgtattacgtatataacaatatgtgccacacggtttctagaaaaatcctaaagagtgctaattttaaaagcaaaaattgttaagccttttacgcttctagtcagcattagaaatacgtttaagtctttcaaataagttcaatgaagcttgatttgaaaggcttttttgctactttgaactagaatgaaattctttgaaataataaggatttatttgaaattaacacaattcaaacacacagatacgattcatgtgttaagaatgtgcttgaaggaaaattaagagtactaaatatagtgatttaacaggcgttggagcctgttttttttgtgtttggttagggcattttgtttaaattaaattcagtggatttttgtgcaaaaaaatagccatattgtagggttatacatattgactattttctattattaaaattatttcaattcagccacaaacctaattccttgataagaaggaaacttgtaattatcccatgaaaaataagtgtctggaaattagttctttctatttaatctcaatgctatttcaagttagctattaatctgtatcctaagaatccattgctagattttggattccaagcaatacctacaccaatttttgtatattgaccagataaaagaatgtctctatgtccccaattagatcctgcatcatgataaatgaaattatttaagcaaatttttgcttgtgtagatggggtatcagtattatcaactgcacctccagcaagcacttctgcgtattgagtgcggcttccgtctggccttgtatggctaaaacttgtatttgcttcggtagctctagtccttgcatattcttgcagagaagtatcaagtgttaaagaatttagtccctttgattgacgtaattgatttaattgcgcaataaattcttgttctaatttggtagcaaaatcagaatccttaatgtttgtatattcattattgggttttgtatttgtggtttcattatgcttaataaaattgcttgaattagcactttgagtatttgtttcatcggatgtacttttagtaatagcagatgttttagaagtgtcaggttctgaaactttgtgagttaattctgaactaatccatttgttagttccaactttgtaccatgttttaccacggctatccttcttttctgcataaacatataagtattttttaccatgaattattttagtgcggtaagcttttacacttctgcctttcttgagtgttcttgctcctttaatacgcttgcctttatagttgtaaacataagcattgtgagtaagttttacgctgctagtgcttgcttctactacattggcttgttcgttgccagcaacaactgtagctgaaagcaatagagctgatgaaagcgtaatggttgatagtaatttagtaacgtttttcttttgtaacatggtagttacctcctatattccttatttcagattagcaataagactgtaccctaaaaatccgttacttaatacgggatcgaaagcaaatccaactccaatttttgtatattgactagataaaagaatgtctctatgtccccaattagatcctgcatcatgatagatgaagcttctcaattgttggctggcttcttgctctggtgtacttgtgtcgttaactgttcctcctgcaagtacttctgcatattgagttctacttccatcgggtctaatatggtcaaatttagtattggcttcattagctctggttactgcataagattgaagtgtattatctatgcttaatggcgctaacccattggatctacgtaattcatttaattgagttacaaaagattgttcagtttcatttgcaaagtttgagtttatgatatttgaatacgtctgttcatttgaagccgaattattatcttgttgagtaatactttgtgaatctgctttttgacagtttttggaactatttctttttgtataaaatttatcagtgtcagtagcaagtatccatttgttatcaccaattttataccaaattttatcgttaactttttcttgagcataaacttttacagattgtccgactccaatgtattcgccagtaggtgattgattgggagctttatatgtttcacccaatccattatctgtaatttttgcagtgaacaaataatttgattttgtgttttgcacatttgcgagcctgatatagtgatgactaccaatgtataaatattttgtgccacgtattttcttagtgcgataggcttttacatatttgccttttttgagtaatttaacacctctaatacggttgcctttgtagttatagacataagcattatgcgtaagtcttacatttttagtgcttgcttccactacattagcttgttcgttacttgtaacaactgtagctgaaagcaatagagtggatgaaagtgtaatggtcgatagtaatttaacaacttttttcttttgtaacatattagttacctcctacggatattcattatttcaatttctaaattaatgatacatgatgtgaaaatgcatttcactgctgtttttctttgctggaattatatttatctctcgtaaatttataaaaaagtaaaagattgaaaagttaggtgcatcatttaatacaaaatataaactgaaatagattctcgttgaatttggaaactgtcaaatcttttgtgtaaatagttctttctcgtaaattgattttttaattatttatttaatcaaagtaggattctaaggtgtcctgaacctgaccaaagcctttatgaattcgattgaaataacggtcattgtagctcattgcctgaatgccaataaaagcatcaagcgactgttcagttggaaactctgccttaggcttagctttgcgcttgatcacattgttaaatgattcaatcatgttagtcgaataaattgaagctctgatctgcttgggatagttataaaagaccagcagatctggttctatgtctttcaagcttctgataacatggctgtaaaccttgccccatttggtatagaagtcatgcaggacagctgtggcttcttctttgtttgtctgttgatgcacctgtttgaattcgttcatgatcttttcacgatcgtcgacgcgtactttagcgcagatattgcgcatgacatgaaccaaacagcgttgaaaatgagctttaggataagtcctggccaaggctgttttcatgccaacaacaccatcagaaagaaaaagctcaacttgctttaagcctcgggatttcatgttttgaagcatatctgtccagacttcaatgttctcgctaggcgcaatgcagtagtcaatgacctccttgtgcccattaggcttgatgccaatggcaatatagactgcttcacgctcaaatgtttctcggcgcaaaggaaggtatgtcgcatccaaatagacgcagaaaaacttgtcgcttagcttgcgtttgtggtaagcctcaacctttggaatcatctgcttggaaatatttgatacctgagctggactgtaatggctgccatacatcttttcaattagatcggctatttccctggtggtcacgcccttggagtaaagcttgataatcatgctttccaagatatccgagtgctgcttgtagtcaggcagcgtgtgctgatgaaattgaccgttgcgatcccggggcacttgcacttcaattgggccaaattgcgtatcaactttgcggaaataagcaccatttctagagttgccagtattccagccatttctggcatagggatcatagcccagaaaggcggtcaattcagcttctaacaagttattaacagcctgttgtagctctttgcgcaataaatcatttattttgtctggattgaatagagcttgagcaaaatctttggtaaaatcattcatgaaggagttcttctttctgtatgtgtttttttgttcaaaccaatcatacgagaaaggaactcctttttctaatgtttaaagaaataaatttaaggaatcattcatccttacacaaactattttacagtctcttaatttgacaagcaatatacagaaattatcaataaaaagtacgttttgctataccttttcataaacctgactacaatgagagttgaagaaggcgtttttgtatgacaaaagaatatgaaaaagaagtcaaagaagcagaaagcgtattggaggaccaaaagttaactgatagtgagatttcacaagaattgatttccaaagataatccaactgaaaatgtaaaaccatctgagattgatttcttgcgtaaaaagccaaatttgacaacgcaaattgatttcactttgttagctgatcttgctgggttatccaaggaagctaaggcagaagcggctgtatagataaaaattttacgtagaaaaaagaccggtttgaaccgatctttatcttataaaaatttactttaggagcgtttgtgaaacttagctactccccaactgattagatagaaagtcgaaatcaaaatgaattgaatttttaattctaaaatgaatagtggaaagtaaaataaaacggaaaacaatagaataatagcgtaaattccttcgaatgttagaaataatctgtttctttttctatttttaagtgttgctagtatcattttttcattcacaaagatccctcctaaaaattatgaaattaagaccaacttaaataaggaatagtccatcggataggaacacctaggagccaatgtccggagctgagaaaagtgttttttaacacaacggtagtaacaattgcaataactgcgagtactaccaataagattagtaatgtactttgtttaatttttgacatgattaatgcatcctcctaatattttttaaacttctattattttgctgggataatgaccggtaattgccaccacattactgtagcctcctcccttttttaatcatttagtcggtttggttaaatactactccttagtgactagaacagattaattttgtatcacatagtttacaaattatttgggccaagttttaattaaatcttgataaccatatttttgtacttcatttctaattttttgcgcttcctctttattgtttaaaaataaattctttaaatataaagcagcaatcttataaagcaaaaaatgtatggttggttttgattccatgatgtagtcaattatttttggaacatgcattaattgaagtgattttttagaaagttttctattatagcaaaccgctagataattctcgaagacacgcaagtatctttcttgttctaattcggagatatttttattgcttttcatctcgttaagtagtctattgataaaaaatgcaagggtatcttgttcccagagcggcattgtattagtaaaaagtcgcagtaattcaggattagtcatccagttttgtccttcgttaaattcaatgaatagatctttttttattttgggatcgatttgatttaatttattttttaaatatgctacagaaatcatagctcttaattttaaaatcttagagtgagattgtgacagaatttcttgatagcatgattcaatttcatcaatttttcctacattgaaggcttgttccattttattatttaaatctgattcaatctttttttgctttgaagtataggttgctcgcaataattggtaaaagtaagtaatatcaacatcatgttcaaaaagaatcgcggctaatttatctgcactaattctgctttttcccgcttctactttcgcataaaaaggccgagtaacaatgttagcagccatttctttttgagtgaggtctagattttgtctaatttttcgtagtgcttgtccaatagtcataaaaaatcctttactctaaaatattttcttctctacgatatatgattattataaatgatgaaaatataagcggataaattaaagagaactatggatatcggaacggcattaagacatttgagagatgatctaggtttgacacaaaagcaaatgattcaggggacgaaaataactgttagtcactattctaaattagagaagggacaaaacaggatatttatcgaaaacctagtcgagatattgaagcaacgaaatatttctttatcatattttgttgatcactatcttaatgatgaaaatagtgaaaaagaagtaaattattcagaaatattaaatattgctttttacgaaaaagataagatcgctgctgaagaaataaaacgacaaattttttcagataagagttctagcaatgaattgagagatagagcaacattaattgtggatatgatagacaaccagggacagagtaatgttgatgctcgaatcattaattctattttcaaacatgacaactggactcagtatgacgaggcaataatattattgggtaatattattagaactagtaatgtattaaatatgagtcctttggtattgactctaattagaaaatataaagatctagataaagaaaaaatcgaaaaacaaagaaggttagcaacggttggaattaattatttatttaattttcgaaagttaagtaaagagtttaataaaactgtgctaaaaattataagctggattaaaacaacatcgattgttcctgagttaggcattattcgagaattaaatgcatattttttagcagtttatgaaggaaacatttctgtctcaactaatatcaaaaatgtccttaaaatatcaggttatcaaaatcttgctaatgatttacctaattaatcccctgagaggggattgagttgctgtggaatgagaagtagataaaatcatagttaattaaatatgaaagagaggcatagtaatttgattattgttagttatccagttttacctgaataactctgagttcatacagtacgaggagatataaattatgaaaaaaagattttgttaagcctaagtttagtagtattaggaaatactttgttttttaattcgagtgtagcttctgcagcgactaataatagatattccgtaaataatacaattcgtcaggcacctaatactggcgatgttcctggtggatggggcattactcctggtcatacacattggggctaagtgatagaagcgatgaatgaattttcattgctctttttattttgggatgcgaattttatgaagaaaagtaaaatcatatttttaatagagcttgtattaaatattattgctgctgtttttctagtaataaataattcattcaaaaatttattagatgtaggcgttgtatttttactacttctattgcttatttggaattttttaagaagaaaaattgagattagtttaaaactatcatggctcaatcttatgatattaccagcaatttttacttattgcttaaatactgtagctaatgttttattggtaaaatatcctgttaaaagtgttttaatagctataatttatagtttgttattcttagtttatttgcttccggtagtaattactaatgcgggattggttaagaataagtatgctagagtttttattgcaatgtattatattgtgctattactttttagcgaaaacttacatatgaatgactacttatcatcctttgtaaattggtctcactctgaaattcttaatgggttagcgttaattccaatcatattttgcttatttaaaagttgggatattcgagcaaagcttaatcttaaatttaggcgatattcaaatatacagttaatagttttattagtagctgtattctttgctgcttggtattccttctttcatagctatgtttatattgcaccaactttttcgcaattattttggaattgggacttctcggaaattatcccaactgaacgagctgttttatggagtttaggagcgattttattcgaagaaggattccggtatctattaataattgtattgcttgaagtttttaaagtgcaaaggggtcaaattgactattttcttgagtgcgctattttttggattgatacattatgccggactacttgaccaaggcccaatatttataatttcaacgcaagcaatttttgcttttggttatggctgctttttggcgacactgtacttatattctggaaaattctggttagtattgctttcacatttttcattagatcttattgcattctcgctttctgcaggtggtggcggaatactatcatggtatggcaataatgatctcttgagtaatggtttgagcatggtttttgctttagttatgacattgattatgtttttaggtaaacaaaggaaaattatgcaagaaaatgctgctagattaattaatgcatgatgcatttaagatggtcgaaagatcatcttttttatgcaataaagtgtcatatataattgacacctactataaaagttgctattattttaaaaacgtcacatataaatgacatctaactagatgaataaagaagaattcaatgaatcgagtaagggaatatcgtaagcaaaagcaaatatcacaaatggagcttgctagacgaataggggtggcaaggcaaaccattaatttgattgagaatgataagtataatccatcgttagaattatgcctaaacttggcgcatgcattaggaacggatttgaatactttgttttgggatggggatgaagcaaaatgagacgagaaagtttatggcttaagtttgtcagatattggtatggcattgatagtaaattagacgagcggcaattagcagaggttgaacgaatcggtaataatgcctatgtaatctctggtatagtggaactgatcttactggttatcacgctaattatggcattgactattaaaagtgagctggctttgtggtttttacctttggcgattgcaattatgatgctgatgatgagtgcttatacttatttgacaatgcgaaaatttaaaatattctctgtcgaaattacagcagatgaacgccccaaagcaattcgtagaatatggataaaggctataatagcgggaataattggtgcagtttttggtacattaggtagcgcgctaggagcttcttctgtgcaaaataatctagtaaatgtgcttgatttttggccacaaggtttatggctaggcgtatgttgcggtgctggtagtgcgattggaagagtgcaacgattgaaagtaattaaagaagacgaataagcgaatcgaaagtagtcgatccgctttttttgctgaaaaactatataattaaagtaacaataaaatttacagcaaggcaaaaaggatgaaaaaacaaaataagactggctcaattggcgtagtgggtgccacggccatcggtgttggtggcatgatgggagcaggcctatatacattgctcggcttggccgccaactctgctggtgtttggctgccagtatcatttctaattggaggcattgtggccgcattttcagtttattcgtattcaaagttaggaatgaagtatccagatcgaggcggtgccgctaagtttttgctaaaagaattcggagatggcctgctagctggtgggatgaacgtcttccagtatatcggctggattatcgccatggcgttatatgcgaccggatttgcggaatatgcctgccaactattgggaaaatcaagctcaggctggctaggtaaggcaatcagtatcggaattgtcatcgtggttgtggcaattaatattatgggttcaaagcaagtggcacgtgcgcaaacggcaattattgcgtttgaattgttaatcttactgtcttttgtagcggtaggtttaactaagctgcatgtgccgacaattactagttcaaatagcggcaatattgtaggtatcctatctgctgcgggtttactttacgtaacttatgaaggttttggcgtagttactaacgctgcagggagtatggtaaatcctaaaaagcagttgccacaagcgctgttcttttcattagggatcgtcatggtgatttacattgtagctagtgtagtcgtggtgatgaccttaggcgttcaaggcgcagtagctaatcaaggccacgttttggcaacggctggtaagctagtattaggcaactggggtctgttcatcacttcactgattgtctgcatcttcgttgtgattttcccattatcagctgttggtgagatggccagcctagcctttttattggtgtatgccatggttaacttaggccacttgcgcattgcaggacaaactggggccaagcgctggattttgatttgctctgttgtattgaatctagctttgtttgctttgttgtttattcagacaattctcaaccacgaaactttaacttggatttcagtaattgctttgttaattattagttttttagttgaacttgcttggcgaaaaaagaataaacgcaacctgcattgattaggaaaaaaatagtaatttatgatacaaaaagtcgacttttgttccacttattgggtacaaaagtcggctttttgtttttttcgttgtcaaaacaatatctttaatattttaattcagatatactctctttgatcaagtttgaagtgagggaaaatgaatgaaaaagttattgatcggaagcgcagtcttagctgccttattaattaaagaaaatatcgcagtaaatgcggcaatagagcaaaacgaaacaacgcctaagattgcagttactgacaaaaaagagaagccaaaagaccagtctgataatagttttgcaggtcattatgaccaagagacaaattttattacctgggaaataaggctgaatcccaagaaagaaaaatatactggtgatttgaagttggaaaatttaattccagaaggcttagttctagatccagatacgattgaagtaattaagaatgataattttattcaaaattctagtttagttaaattgaagaaaaacaaattaacagctgaatttcctgctaagaagtattcagagagcacaattttgattaagtatcgaaccaaggtggaagcagagcctaatgagcctaattatcttcgggtgagtcagtcctttactttgggcgatgatcgagttcaagaatacgagcaagaaattaaatacgatcgaagtaataagaattttaacattgaagcgccacataaatctacgtttagagatgataatcaaatttcgttaattaaaaaatctaaaagtaatgaagaacgctctgaagattggcttaaacgtctagcagagctgattattaataaaaaagaaactacttcagataaaggaggtgaaaaagttcaaggacaggtcaaagatcaaaagcagcaagcttccccagaaaatacaaacctttcacgcactccaactgtcaaaggcttgactggttttgatactaaggctaacgaggtaaaatccacagctaaaatagattctgattcagtaaaaactactctagataaagacgagattaaggacaatgcaagtactatctcgcctaagtcgcaaaaacacgatactcatgtcacactccctaaaagtgacacatcagaaactaaggcaaaattacctaaagctggtgaaactgccggtgttatgctcagcgtatttggcataattttaataattgcagggtggacagttcgaacaaaattcttaaaataatctatatttgtactaaaatacggattttcaatagccaaaatagactctttcacgtattatttagatagataaacttgtatcatgaaagagaaacaaacatgccgtacactatttcagaaattattgttttattttttacttattcagttatcggctggctttgggaaaccttttattgttcgatcaaagaccaccattatgattatcggggatttctgtttggtccttactgccccgtatatgggttcgccgttactacaattttaatttgtaccaaagacgtgcgagataacctgctccttttatttatagtagggactatcgttgccactattttcgaatttgtggctagttggctattagagacaatctttcacatgaagctttggaattattcaaaattatggggtaacattcaaggtcgagtggccccaatgatttcattattttggggcgttggtgtagttttattagtaaaatttattcagccaatcattcagaagctcattaataatgaagaaaagataactcatggctggctagctgtgggtattaccattgttatgggtattgacttagtattaacagtaatcagtgtcgagagattccatactacaactaagatgtgggatgtgcatgttaaccactttattgagcgagttagaactaaagtagaaagtcatatgcctgagaaaggaaaattgcgggttggtgattggcaccactcagtgatgcagcactatgatgaattacaaccgcaacgattaagctggaatcataagcgctacttgaagagctttccaaaattaaaagttactgatgctcctaagttcatggaaattaagaaagaagtcttgaagaaagaaagctaactaacataatcttattttgtgggattgaaaaaagtcggatgatcatattaggtcatccgactttttcttatccattaattctatttggttcacgttttttactttttatttcggtgtagttatctaaaacgttggcatagcgtccaagggtgaaaaggtaatcagataatcgattgaggtattttaatacgtcatctgataattcctgttcatttaaacttaatttgaccaatataatagcaacaccatcaactcctgaaactactgaagaagaacatctgacagtaaaagatcatgtgggttcatcaactttaagaagaggattaccacaaactggtgaaaagaaatctactttgaatgcaggctttgcccttgctggcataggcttggctttgcttgcagggatgttgtttgatcctaaaaagaagcactaatactgaataagaattaagttcgttaaagatcgaatcattttgggttcgatcttttttagtaacaaaatttaaaaaatcccaccttcgtgaataattgaatactttatatatttcaatcgtccactttagtgggattgtattaattcaggatgatctttttgaatttcctgtttttgaagggcagaccaagtccatggaagagttttttagtcgcctagaaactataggcaaggcttggcataaagcctatgataccattgattccgatacagatagagtcattaagagaactaaaatggatgctcgtactacgttagacctactagaacatctatcacctgtacagttctcttgaagagaaaaagaatatcagcacgtcaccagtatggttcttagactatgatcaaaaaatttattgtactgatgatgccatcattggtcagatgcttcaaaccattaatcatgacattacccgacgcagcagtcgtagcttattacactggaaaattcttaaacaaaattgttccagaaatttttatttttgatggatattattttttgcttggttctaagcgattttatttatcaaagttaatagttctatgttatattataagtgttataataatgtaaaaattattaagcattgaaatatagtgcattatgatacgaggagaaagatcatgttagaaagagtcccaaaatatacactaagaaaactgtcagttggcttggcctcagtgatgattggatcaggaatactgatgaactctccaaaggtacttgctgatactattaacccaaatgaaggtactagtactgctgttcaaccttctagtcaagataaagataatagtgagccaagtactcaatctggtgctactcaagatgaaaacattgattctaacgcagctgttcaagagagaagcgacaactcagttactgaaccagcaaccacaactaatgctgaagaaaaagtagtggcaacaaatacccaagatactacgcaagataaagacaagcagacaaatgcgaatgaaactacgcaaaatactaccaatgtcgacaaaaaagatactgaagtaacgccgactaacgacgcaacaacagctacaccgaagacaaccgccaaggttaacgcaccggctgcaccaacagcaatgaaggcagcagctactgctgaaacaccagatccaacggttccagataactcagctaatactgctattatcaatgacaagaatagtttggaaaaaatttggcttgaaacatctactgcgcgggcccaggtctacactaccgttaagggaactgatcaaaaaatctatgtcagttcctatgcagaattcggtaagcgacttaattcattaatttttactaatcgctttgatccaaatagtctagaattacacattgaatatcaggtgttaaaggatagggttcaaaatttcattgtaaattggggagactggctccgactagataccagtagaattggtaaagatggtctaactttcactacagatacaggtgaaaaagtagcctatacgttaacaccaggatggggggaagtacaaaacctatgatgaatggcttagtgaaggccaagatatgagtaagataaatgctcttaaaattggcaacaatttaaaggccgggactaacttcgtattaaccgttcccctaaaatatattggtagaactgatggcacaaagcaatttaacaatgttcaagttgtagattacgggcagccaaatgctaatatggtgttcgattttattgaattacatccagagcaaatcgatactccagaagctccaactactgataaagagtcagttactaccggtatctataacaatccgttagctactgctacagactggtataaaacggagcatggtgaatatgttgcatactatacagctaaagggaaagatggtaagacctatgtaactggatatgtggctgccaatggtaagtctgagtcgattatcaatgttgatcagattgatctaaataccttggaataccatatgatttaccgtaatggtgacgaagaagtagcggccggtatttcagcaagctttgctgatggtaagactctagtggttgatgctagtcgtataggtgctgatggtatccgtttgaagagtcaacagggttggtcttataacaacgggggttatagagagaatactagtgggagactctattatagttgggaagattttcttaagaaccataacggatcggtagataacctcgttggcatcaatatgaatgcatccgctttcaagccgggcgatacaattgaagtagttgttcctgttaggtatattgggaaactttctgatcaagttcaatccttagaatttaaatctgaagctagaaaagatgtttcggttaaactctacttcacaactgtgcgcaaggacttaagccaggttaagcaggtagtcttgcttccgactgagttcatgggagaacaacctggtcaatcaaactggaagctggttaaggaaattgaaaaagatatgccaaatgggtgggaggccattaaaattagtaacttcccaacctataagggatcattcaatatggattcactaccaaaaggggacttaccatcggttgtttatggctctgcgcaatactttgttgacctccaagaaattcagaaaatttttgctaaccatggttacacggtcaagtatgctaacaacaacggtaaagctcaggaaatgccattctatggatacgttaccctgccactggcccttattgatggtggtggtaaacctgttgccccatctatctggacaatccaagttcaagctgtgcctgctattattttaaataaagatcaacactatgtggcagatccgaatgctaagccatgggacaccacttcaatgattgatgagatttatgctgctgatgacgcaggacagcggaagacgcgcgatcaactagaaaagttgccaaagacggacgtggatattagttatgaataccaagctccaggggctgctacagctgctccggttgataaggtcgacttgactaaggcgggggtatacactgtcacttacagtcatacttatgctgatgggcgagtagttaaggatagtcgcaaggtttatgttgatgatgttaagcaagaaaccaaggacattactcgaacaattattgtccacgagccaaacggaactgaccaaacagttatccaaaaagcaacattgacacggaaagtaattcttgatgcaactactggggaaatcaaatctgtgggtggatggtctactgctaagtgggaaagatactcagctccagaatttaaaggttacactccagccccggctcaaattgatgaaactgctgtgaacaaggacactcaggatacaactgttgagattagctatacagctaatgagatcacaaagccagaaaccaaggacattactcgaacaattattgtccacgagccaaacggaactgaccaaaaagttatccaaaaagcaacattgacacgggaagtgattctttatgcacctactgggaaaatcaaatctgtgggtgaatggtctactgctaagtgggaaagatactcagctccagaatttgaagattacactccagccccagctcaaattgatgaaactgctgtgaacaaggacactcaggatacaactgttgagattagctatacagctaatgagatcacaaagccagaaaccaaggacattactcgaacaattattgtccacacgccaagcggaactgaccaaaaagttatccaaaaagcaacattgacacgggaagtgattctttatgcacctactgggaaaatcaaatctgtgggtgaatggtctactgctaagtgggaaagatactcagctccagaatttaaaggttacactccagccccagctcaaattgatgaaactactgtgaacgagaacactcaggatacaactgttgagattagctatacagctaatgagaccccagagcaaccagataacagcaaggacaaaggtaataatgacaacaatggtggtaacaattcagatgcgattgtgccaataaatcctagtgacaataactcaaataattcaaataatgcaccaactgacaataagaagactgatgacaccaagaaagataatactggcaagaagattacaaaggagactcctaagaaggtaaagaataataagtctaacaagaccaaatcaacgactacttctaaatctaaccagtcttcaaaggctaagcgaaccactaaatctggtacgattagtcctaaggcagtcgctttagctaatactactgctggtctagctacttcagctaaggcaaatatggaaaacggtattgccaagaacaacagccaaaattctcaaactttgccacagactggtgaaaatgaaagtaaggtagcatttgccgttgccgggttgttagcagctgctttgggcatttttggtatagctattaatcataaaaaagaaaattaattagctaagttgaataaatcatacaaaaagacgcatagaatagcaatgtcattaagttaagacattgacgaaaatcagactttatgaaccgaattattttggctctttgtcaaacaccctaaagtataaaggtagatagaaacatgacgatgtttttatctaccttttttcttatacttagattgagcttgcggttgaacccttcaaggcagccgttagaataaggcagttttgctccattaagcacagcttttaggttatgtttaaaggtcaatagtgttttgtgcattaaagtcccaatttgatcttggcagttgattaataagttgagctcatgagtattgcccgtttcaacggcttgaataaagctttgcatcaggttatatgaattctctaaggtagtgctggtattgatgccttctgtaactacttgtgcttgagttaagcagtctttgtagtgccagttatagtgaggatgaactttttcaagttcatcaaacttcttcaagtataatttccaaggagacttaagcagctgatattgccgcgatcttttatcaaaggtcttcatgacttggaacctcagcgagttgaatgagcgcgtaagcatttgaatcatgtgaaaacgatcaatgacaatctgtgcattaggaaaacaagctctaacgatatcttgatagtaaaaattaagatccatcgtgaccgttttaacgttagctctagcttggagcgagaaacgaccaaaatacttaagcagcgtcttcttgtagcgagttctaagaatctgaacgacttgatgattatcaccatccaggcagataaagtgcagctggcggtaactcatcaaaagctaaatgagctggcaaatattcgtagctgtcaataaaccggtgtgaacagttgcccagtactctttgaacagtattaattgaaatattgttttctctggcaatgctggtcatagatcgatcttcagttaaagctgacaacactttaagcttagaggcattagaaatagaacagtatttaccaattcagactgagccatagatcagcgctcacaagtgcgacatttaactcgttgcttagctaatcttataatgaccggtaagcttgcattagctgtcggatagtgaatgttggtaatcaaatggccattatgtaagagatctagggagccgcagaaaggacaagcaggttgaagcaattcagcttcatagattttatgcttttgcagtttgatcgatttatagaaatcacctttatttataagaatttgtgtggaaacgatttttattgaagaggactatgtcctcttttttgcaataaaaaatcctgttaacagcttatcatatagataagtcatcaacaggaaaaattatagagccaatattttgagattaattgataggggttgaaaagtaaattttatttgttatagaaaatatagaaaaaggattgttcaagaaattattttacgaaacctgcagtgaaccaagtgttggcactaggcttaagtgaccagccagtgaccttcttgttaacagcagtgattgagtattggttggtagttggcacaacgtatgcttcatcatacatccacttttgccacttcttgaaggcattagcacggtaagtaggattgaaggccttctctgagtcgatatcagccaaaagcttagtttgcttaggtgaaacgaaacgagcaaagttgtatggtgcagcttcattgtaaaggtcgttaggggatggttcacttgaaagtgaccaaccaccttcgaagacgtcgattcttggatcgtcagattgaacagcttgtacccagttgttgaattccattggacggccgccgacaaatttaacatccaaaccaactttcttccattgttggatgtagtttctccaaacaggttcagcggtagttgagttgtttctaacagccaagttaattactaacttcttgccgttaggttgaactctgtattcacccttcttcttgtagccggctttatccaataattcgttagccttcttcaagttgtatgggtaacccttgattgacttgtcagtataatcaccaaattgttcagggatcaaagtgttaacgcggaaggccaagccgtggtagtaacgtttagcgactgcatcaacgttcattgcataagccattgccttacgcaatgatggattgtccatcttggagttcttgttttcaacgttcttgccagacttcttatcccatttacctaccttaaagcctaagtagttgtaggataggggaaccttaccaatgaagttggtatcagtagcgttcttaacatcatcccattgggtgttaactacgccagctatgtcgaacttgtgactcttgatggcttgagtaactgagttggtaccgatgactgtcatggataccttttccaagtttggtgtaccacgccagtaatgcgggttacgttcccaagtgacagattgaccacgaacaagcttgcttacgcggaatgggccgtagaagagtggttgttttctaaccttgtcactagacatcaacttggagaatggtacgtcctttaagtaatggtaaggttcagcgtattcccagaagtaaccgttacctgattgaagcataccaggcttcatttgtttcgaccttgcggccatcttcgccatcaggcatctcaataccagaaatcttcttgctcttgccttcgtgatattctgctaaaccaacaatgtcggcaagagaatcggtataacgttgtgacttggagtctttattagcgataatttcataagcgtattccacgtctttagcattaacttgcttgccgtctgaccacttaacacccttcttaacctcgatagttacggtcttggctttacggtcaagcttaaaggtagcagcacctttattgttaatcttgtattgatcgttgactgagaataacccttcttgtcctggctctgcaacttcactgtcagtggcagtatcagataattctggcaagaaaataccagtgaagggactatcagattcgatagcataatttaaagtgccaccttttttaacacttttcacaggaacagtttgactgaatttgtgatgtgtttcatctgcattattattttttgaatttttattattaccacaggcaaccaaacttaaagctgccccagaaacaagtgctaatgcaccaaaatatcgttttgctttactcattcaaaaagcacctccaaataaattaaaaatatttgagttttattctatgatattaaaatgaaaaaaacaatagaaagatgaataaaaatgtgaaaaatattatttttaaattatttttgaagctaagattagttttctttcttggctaattaggcatagaataaggaaataacagctttttatgttggaggaaaatatggatacagcctggcaaaaatttaaaaataatattccattacgtcgatttgtggtactgctattaattattgcctgcctttatgaaatacgagcaatgatgaacacagtattattaacttttatttttacttatgtgatcgtgcatttaattcatctagtgcagcggtattttcctaaaataccaacaggcctaattgttgcggtaacatatctaattatcttggcgctactttatttcgtggttaccatttatttgcccatgttagttggcaaaatatctaaaatggtaaagtcagtgatggcgttttatgaatcaaatgaatcatcgcgcttagccagccatgtaacgcgttatatcagtaaaggtgagattgttacgcaggcaaaacgagttgggacttttgctctgcatacggtgaccaattttggtagtttaacaattgctacctttatgtcattgattttgagtttcttctatacgattgaattagatagaatgattgaattttcaaagttatttgttaaaagtggttactttaaatggctttttgaggatattcgctattttggtaaaaagtttaccaatacttttggtgtcgttttagaggcgcaattctttattgccatttgtaatacggccttgacgatgattggtctggcatttatgcatatgccgcaaattattgccttaggcttaatggtctttattttaagtttagtgccagtagctggtgtgatcatttctttaattccattaagtattatcggctattctgttggtggcattcgttatgtgatttatatcttcattatgatcatgattattcatgcaattgaggcctatgtgttgaatcccaaatttatggctagcaagactgaagtaccaattttctatacttttttagttttgttagtagctgaacacttctggggtacttggggcttgattgttggtgtaccgatcttcactttcttgcttgatgtcttagggattaaatcggcgaagaaaagtaaaaagaaagcgaataaataatgagagtacttttgacaggtgatagcattattgcacgccaggaaggaaaaaatgaaccgcatcttaattggaatttgcaccaattattgccagatattgaaatagaaaataccgctgtttcggggattaactccggggccttttttgccaaattaaatgaattagtactaagcgtaaagcagtgcgataatttggtgatcttgctgggaaccaatgatttggctatgcacaaacaagtgccagcaaggcaatttaagcaaaatatggaaattatttcctcggcaataatttgtcaatattacccaccacatgttctgcttgtttcgccgccagctgttgatgaagctaagcaacgtgtacggaataatacgttagtagcggaatatgctcagatcgtgaaagaagtagcacatgagtatcattttcgttatgcagatctggcacaagctatgcgggatactggcgatttaagcgagatttgtcaaggagtaaaaaacgatggacttcattttggtgatcgtggctatgagattttaggaaaactaattgctgaaaatttgaaacaaatgtaaaaaggaccgcaatttgcggtcctttatttttcgctattttaatgttgcccaaagcaagcttccagctagcgcaatggccaagaacggaatgagcaaataggcaaaaaagaaaaacataattcctacgactagtaaaaagccgataattttaatgaggccaattcctaatttaaagaatagccagagtaagagtaatgttaataataaagaaagcatattaatacctccataaatctatgagagtattttactaccaaattggacgaatagaatagtaggaagattaatgctttagaaaaatttagttaccggtaacaagataaattatattgaaagctctttctgtaaccgctatattttaactattgaaagcgatttaagaaacgagaggaaaaataaatggaggagaaaaaaactgggttacctacgctagctagtacgacaatttggatgattagtttggggtatttgggtgtgcaaatcgcctttactttggaaacatcacagatgagtcgaatcttccaaacattgggtgctgatccgacaaaattaggctggttctttattttaccgccgttagctggattggtagtgcaacctggaattggatcattatccgatcgaacttggattcctaagattggacggcgtttgccatatttattagtcggtatgatctttgccgtaattactatgattttgttaccaaatgttggtagttttggtctaggctatggttcaattgaggctctaatatttggtgctgttgcaatcgcgatattagacgtggcatcgaacatggcaatgcaaccatttaaaatgatgattggtgacatggtcaatgatgaacaaaagtcatatgcctatgggattcaaagcatgttgtccaactttggtgctgttattgccgcatttttcccgttcttattaactagtttgggtgttgctaatactgctaaaaagggtgtggtaccacaatcagtaattatttcattttatgttggtgctgccgttttagtcattacatcattgttcacgatattcagagtacatgaatatgatccagaaacctacgctcgttatcatggaattaaagaatctgataatcaagaaggcggtggttggattgaactgcttaagaaggcgccaaaagtcttctggcaagtgtcattagttcagttcttctgctggatttctttccaatatttatcaacttacgctactggtgctattgcacaaaatgtttggaatacgaccaatgcctcctctgcaggctaccagattgctggtaactggtttggtgttttaactgctgtacaatcaattgcggcagtagtttggtcatatgttttagcgaaggttccaaataatcaccacaagctaggttacggtatcagtttgctactaggtggagtaggatatacttcaatcttcttgattcattctcaggggtttttaattctatccttcattttaattggtatcagttgggctggtatgaatacttatccattgacgatggtatctaatgctttatcaggtaaacacatgggaacatacttaggattgttcaattgctcaatctgcttacctcaaattgtagcatcactgctcagcttcatgattttcccaatggtgggtaactccatgccagcaatgatgttgattactggtatttcaggcttcttaggcgctttatcagttttagcaattaaggaaacctacgtaaaatagcataatttttccgataaaaaaacactgcgtgcattgtcaatgtcattaagttaagctattgacattggagaaaaaacaattaaagcatcatttggctttagatagccaatttgatgcttttttgtgtacgccaaataagcgtagtttgtatttcttttttattaggccacgcgatacatgtaatatactgcagacttggcttttaaatttcgtttgtcttttcgcctttatttttgcaaaaaaaagaatcgaatccaaatgattcaattcctaaaaagatcagttttcaaaagtcaatagcttaacttaatgacattgcattttgaataactgcggagatttttggtataagtcccttaacgatgacctcggctcttattataataagaaaatccgcaaattcacagtgttcatattatagctgtcgttcactcttaacttataatcctaaaataacgttctaatctgtgaagtattgcagaatatcctcctcagttaggcgttttttgtcgtcgcctttgacatcaaaaacgattctaccattgtttaaaatgatagtgcggtttccgtatttgattgcgtcttttaattggtgagtgatcatgacacaggttaaatgctcttcttgcacaactttatcagttagttcaagcaattcgcggctagtatttggatctaacgccgcagtatgctcatctagtaagagtaaatcagggcgcttaattgtcgccattaaaaaacttaatgtttgtcgctgaccaccagaaagattacccacaaaagtatttaagcgttcatttaacccattagggagttgggccgcctggcgtttaaattcttgcatatgtttatctaggcctcttaaacgcagaccgcggtgttcacctcgtttggttgcaagtaataggttttctgcaacagtcattcgcggagctgtacccattttaggatcttggaatacttgggcaatatatttagcgcgttttacttcagaaagattggttaaatcttggtctttgagcagaatttttccgctagtaggaaaaatagagccattgataatatttagtagcgttgatttaccagcaccgttggttcctaaaagagtaacaaaatctccatcttcaagttttaaattgatgtttttgaggatttgcttttcctcattggtaccagcattaacagtagtagtaatattttgtaaatcaagaatagtactcatggtttttcaacgcctttctttaataacttacgagtgcggaatttttgttcaaataatggaagcatcatgcaaatagcaagaataatagcggaaatcaatttaaagtcgttggtactaaagccaagttggaggactaggagtaagataaggcgataaataatactgccgataacaactgctaccaagcgggcggttaaacttaaattaccataaacgacttcaccaataatgatggcagctagtccgataaccatagtaccaatacccatattaacgtcagcgtaaccaccgttttgggctaataatccaccagctaagccgatcaagccattagaaagcattagacctaagattttcatattatcggtattgatcccaagagattgggccattttttcgttgtcaccagtggcaataaaggcttgaccaagatcagtatcaaggaaaactgctagcaaaacgatgacgataatggcaatgatcaaaccaacaacaatagtaggaaaattgatcggtaatttttgtaaaagctgaccgtttagtaaagtatttttgttaagtaaaccaacattagccttgcctagaattctaagattaactgagtagacgccagtcatcgttaaaataccagctaaaagaacaggaatttttcctttagtatatagtaagccggttactaagccagtgaccatgccagcgaagaaggaaagaatggtagctgctaaaggattgacgccatgaactaaagcactaacacaaattgcggcaccgaaggggaaggttccttcaacagtcatgtctgggaaatttaaaattctaaaagttaggtagaggcctaaggctaaaataccccagagtaagccttggccaatagaagaagtaattaagctcatttgataattcgtcctttcttttgggcagcttgaattacactgttaggaatagtgatgtttaattcatgtgctgctttttcattgattactgtttcataatgggttacgcgtctgactggaagagcagcagggtttttaccatgtaaaatttgtcctgccatttgtccagttaagattcccatgtcgaattgactgacacacctggtagcgagaccaccacttttaaccatagtatcggcagcaggaaaaactgggatcttggcactgttagtagcctttaataaggtggcaattccactagctacagtattgtcggttgggacataaactgcttgaaccttgcctaccatggtttgggcaacttgttcgatatcattggttgaagtgatagtgtaagggataactttaagtcctgttgcttcagctagtcgtctgaattcacggtactctgatgctgatgaatcatcacttgaggtgtaaatgacaccgatgtttttggctttaggtagaatttcttgcattaaggccagctggctggcgattggctggcggtcctggacaccggtaattttaccgccgggatgcgctaggctttttactaaatgggccccaagaggatcgctgaccgcgcccataactacagggatgttgccagaagtattagctagagattggacagcaggagtggcaattccaatagttacagtcgcattttcctggctaaaacgatcgctcattgatttcagattactttgatcaccttgggcattttgaaaatcaattttaagattttttcctttgacatagccttcatctttgagaccctgaataattcctcgatgaatctgatctagagcggggtggctcattgtttgcaagataccgacagttggcgttttcttttccgcatttttcttatttacttcactgacaaatgcaactgccagaaaagcaaaaagagcaataattgttccgattaaccttttcattctttttctccttcaaacaaaaaaggcacttccttttttcgggaaatgcctaaaacaaaacccgcacgttattttccgtgcgagcaatatttcttgaagattttaccagcacagatacgatcttaatgagtcgcatctgtacttcacgaacagaaacaactctagtgctggaattgccaacgattgattgctgtaaatttaatcatgataaaatcttcctttcgttcaaatttgttagctaaattttaagtaattatgagaaagatgtcaaatgattttttgttagatttatttagttttgaataatttttaaaatgctataataattattccggcaaccatcataaaaagaagggaggaattctcttgcgctatcaacaaataatttttgatgtagatgacacaattatcgattttgcggcaactgaagattttgctttacatagcttgtttaacgctcatcactggcctttatctgcggaattgcagcggcagtatcattcttataatcaaggactttggcgccaacttgaacaaggtgaactaacttatgaagagttaagtgaaatgacttttcatgattttattttggatcattttggcattgagattgatggcaagaaggcaatggatgaatatcgttcatactttggtgaagcacaccaattattgcctggggttgaagatacgttgaaatttgctaaaaagcagggctataagctgaccgttttgagcaatggtgaaaaatttatgcaaaatcaccggttggagcttgctggggtgaaaaaatattttgacttaattgttacgtcagaggaagcccattattctaagcctaatcttcatgcctttgactatttcttcagtcgaactgagatcggtcctagtgagacagtcttttttggggacggcctacaatctgatattttaggtgcagaaaaatatggctttgatagtatttggtacaatcatcgccatcgtaaaaataccttgcatttgcatcctaagtttgtagtagaaacttatccagaattggttaaattaatgcagaatgattttgagaagaagtactaatcattatactttttgctcttcaagaagatgccccaaccaatagttaataagctgacaaaaattattaaaatccaaaagccgttttcattttctttacctggtaagccgccgacattcatgccccaaatgccactgattaaagcgggaagagcaattaccagggcagctgaatctagatatttcattaaatgatttaggtgactgtccatcatggcggtaaagaggccgctaatggaattgagcaagtcagtgtaaacgtgaatcattttggtaattcgtttttgcttggtcatgatacttttgacgcgggcttgatttgctagcttgttttctactaaataattaccaaattcttctagactaggtgtttgatcatctaaggtatgctttaagtaaactagctggcgagttaaatctgttactttttttaattctttggtcttagttgttcttcttgcagcttgatctaaatggtcaattttttgtttaattgttactaattctgcatgaagatgcttgatttggatacacaggctttgaaaaattgtttcaataatattttcttgcggttttaattctgaaagacttcttgttgtgccaataaagagatgattttggtcaaaaattgtaaaaattggaattagctcttgttcaattggcaagtcattacttaatagatcgaaactcactaataagtgaccattttttagtttattagaatcaatagggataaaacgagcaacctcaatcgaggaattagggtaagtgaaaattgtaggatctagatcccattttttgattaaatgatcgatatcgttttgcgtcaattgatcttttaaaattatattctgactattagtaagcatatttgttcacctctgtttcttttttagtttaagattaacatgtaatgttttttagactgaattaagttgacttgaaaatatgtttttttaaaaaatatagaaaggtgagaatatggaattacattcacttactgatacttatactttgaacaacggcgtaaaaattcctgtaattggtttcggtacttggcaaacaccaagtggagaagttgcaagagaatctgttgaagccgcacttgaggcgggataccgtcacatagatactgctgcagcttacggcaatgaagaaagtgttggcgaagcaattaaacgtagtggcgttaaccgccatgaattatttgtaactactaaattgtggaattccgatcatggttatgacaagactaaaaaggcaattgatactagtctagaaaaattagatttagactatcttgatctttacttaatccattggcctaatcctgtagctatgcgtgacaactgggcagagcttaacgctgaaagttggcaggcgatggaagaagcagtgaaggctggcaagattcgcgcaattggtgtatccaactttagaaagcatcacctggatgaattaatgaagactgctgaaattaagccggtagttaaccaaagttacttgaatccgagtgatttgcaaccggaagtaacggccgcaagcaagggatatgatttgcttaatgaggcttacagtcctttgggtacaggtggtttattaggcaatgaggtagttaatgcagttgctgaaaactatggtaaatcaccagctcaaatcttgattcgctggtccttacaacatggctttttgccattgccgaagtcagttcatcctaagtatattgcggctaatggtgatgtctttgactttgagattagtccagaagacatgaagaagttagatggtttacgtggtgcaagtaagttggctaatgatccggatgaggttaacttttaatttaatttggaataaagaaaattgaattatcacaagaagtatcttatttttgaagtaagatacttttttattaggtgagacaatgaagaaaattacaacaggaattgtagctcacgttgacgcgggcaaaacgactctttctgaggctctgctgtacaaggcaggaaatttgcggacgctaggaagagtagacaatggggatgcttttttagatacagatcaattggagaaaaaacgtggcattaccattttttctcatgaagctaaattaacgactgatgatttagaaattacgttgttggacacaccgggacacgttgatttcagtgcacaaacagaagaaacgctgagtgtacttgattatgctatcttggttatttcaattacagatggtgtaactagttatactcgcactttgtggcatttgctcaagcgatatcaggtaccagtttttatttttgtgaataaggttgatgcgataggcgctgatcgagggatggcgttggttgatattcaaaagaacttaagtgagagttgcgttgatttttcgaagattgatgatgaattttatgaaaatgtggctgccacagatgatgccttgcttgagaagtatttggatagtggtgccatttatgatcaggacgtgcagaatgcaattgtgcagcggaaagtttttccaatttattttggttctgcgttgaaattaacgggaattacggaatttttagctggttttagtaaatggactaaggaaaaggaattctctgataagtttgcggcacggtgctttaagatttcgcatgatactaaaggtgaacgcttaacttggttgcgaattttgggtggtagcttaaaggcaaagactgagctagctggtgagaaaattaatcagctgcgtagttataatggtgaaaaatttgtaactattactgaagcagctgctggagagatcgttgctgcaacaggattgactaagacgtatccaggacaaggattcggcgtgggggatgcaccaactgcactgcttaagccagttttgacctataaagttaatccccaggataatgatcttcacgcttgcttaaaagctctgcaaaccttggaagatgaagatccacagctgcatgtgacttggtccgaacatttgcaagaaatccacgtgcaagtgatgggaaagattcaattagaaattttagaacagttaatgaaagaacgttttggtttgaatattgtttttgaacagggaagtattctttatcaagaaacaatcactaaaccaattgaagcagtaggccactttgaaccgctacgtcactacgcggaagttcatcttttactggagccactgccacgtaatagcggtattgtttttgaaaataaatgcagtttagaagttttgactaaaaattggcaacatcaaatcatgacggcattgaagtctaaagaacatcttggtgttttgacagcttcgccgattacagatatgaagattaccttgatcggtggtaaaggctcaattgtacattcggttggtggcgatttccgtgaagcaacttatcgtgcagtgcggcaaggtttaatggaaaaaaagatacgccaacaaactattttgctcgaaccgtggtatgatttccgcttagaaataggaaaagatcaggtagggcgtgctttaaatgatattcagcgcatgaatggaaaatttagtacgcctgaaaatattggtgaacgaacagtcatatccggttctgcaccggtagctgaaatgcaagattatgcgacagaagtgcgcaattatacgcatggtgaaggtaatcttgaatgcgtagtcagtggttatttgccttgtcacaatgcggcagaaattattgaggaaaagaattatgatcccgtttctgatctggagaatacgcctaactctgtcttttgttcacatggtgcaggtcacaccgtcacttgggataaggtgccagagactgcacaatatccttatacttatccattagattagcatgataccatgaattgtttatcttgttacatgtgaaacattaaaaatgcggcatagtgcttttcttattaaaaagtgcaacttgaaataagcgaaatatttgactagttatgaaagaaatttcattttattagcaaaatactgctagaaaatcgcttgcatagtaagataaaggtacgatagaaaggtgataaaacatgacacaaataccttttaaagctgtagcggttgatctagatggcacttttttgaccgaaaaaaagacttttgatcatgcgctatttgcaaaagttttacgaaaattgcaagctaatcaaataccgtttatctgtgcaacagggaaccaactaattcgttcgcatgaatattttgacgagtttactaatgaagtagattatgtgtctgaaaatggggcaattctagaagccgatggcaaagtatttaagcggattgcgattgactatgatactgcacaaaaattgttacattttattcaaacagaataccctgaagcaatcattatggttagcgcacagcatcattgctatattttgacgagtatggatcaagcggataaagacgacattagaatttattatcgtgatgttcaggaaatcgatcagtttactgacattgatccagccgatgcgatcttgaaggtttgtctgacagctgatgatgaactggcgcaggtgattcaggatcggtttaatgaaaaatatggtgactgtattcgcggcactagcagtggtaatatgacaatcgacttggtgcataaaggcattaataaggccaagggcgtagacgatatgcttaagcattatggcattgcgcaaaaagatttgattgcctttggcgatggcgaaaatgatattgatatgcttaaggcatgtggctatagttatgcgatgaaaaacgccaatgcgaaggctaaggcggtagcaaagtatgaagcgccaacgaatgatgaaaatggtgttttgaaagttttggctaagtatttagatattgattaatttaatacgcaaaaaagacttgagaagtaattttcccaagtcttttagtttgctttattaactgctctgaaaatattaagtccgctaattagaatgatgaatccacaagctaaaatcagaaccgtttcaccagagctgtctaacaaaattccggcaacaattgaactaatcggtccaccaatagaggtactggtacgaatagtagttagcactctgcctaatatttcatcgtccgcagtaatctgaatcaatgattctgccaaaatattgtgaatactcgtcattagcccaaataagaaaattagtcctgtgaatatcaaccaattgttactgaagaaaattatcaaaagtaatggtactgcactagctatccaagtaaaaccaattgtttttacccgtacggataatcttcctgcaatagttgcacctattacaaagccaatcataaaactgatatagaacatactgtatagtcccgcttgaccattttgttgagcaattcttggcaacagaatggccattgctggcgtcacaaaagaatacaggattgaggaccagaagtaatgacttaagaaataatttgttttaataaacttatagccattaagaatttgattgaggtattttgcctctgcttttttgactttaggtctatctttaatttcttttagggcgtaaaacagaaaaacaaaactgattaggctcagtagactgcagatcaacattacattagctgaaattaaaaaagttaataaaaatccagaaagagcagttcccgctacattcacaaactggtcgatgttgctaactttagaaattagattatttaattcttggtcatcagccgttgtttcttttaaaatagcccggtcagctggattaaaaaattcatcgcagacagatactattcctgcgcagattaatgccaaaatataacttttgctaagttggtaaactgcaattgttgtggcaaataggaaaacagtttgaacaagaattgaatagtaacttgtccttttgaatgaataatgatcgataatggggccgtagaatattgataaggcggcagtggtggaaaagatggcttccgcaattccgacgacaaaggaacttttggtggaagtttgcagccaccagataaagaccatgctgaagagggaattagctagtccgccaacggcacgcgagaaaaaatatgatttcttttttaacatttgaagggttcaccttactatcatttggtcaaaggtatcgtatccacaccatgaatatggatggtttctaataattttatctatttttttaaatacatatttagactcattaacaatgcttgctctgttttgaatttttgacggataaattggatcttcgaaagtgatcttgattttgtatttttctgtcatttcagtatgtaagataataattggaacttgcattttattgcttacccaagagctacctaatggcattgaaacacgtgctcctaataaatttacagtatgttgtggccctagtcccattgaaatttctggtggaattgctactactttgccttgtctgatgtcttttaacgcttttcttaatattaatgggtatggaacaccataactatcaacaagagactgtaaaatagtttgtgtaaggatgaatgattccttaaatttatttctttaaacattagaaaaaggagttcctttctcgtatgattggtttgaacaaaaaaacacatacagaaagaagaactccttcatgaatgattttaccaaagattttgctcaagctctattcaatccagacaaaataaatgatttattgcgcaaagagctacaacaggctgttaataacttgttagaagctgaattgactgcctttctgggctatgatccctatgccagaaatggctggaatactggcaactctagaaatggtgcttatttccgcaaagttgatacgcaatttggcccaattgaagtgcaagtgcctcgggatcgcaacggtcaatttcatcagcacacgctgcctggctacaagcagcactcggatatcttggaaagcatgattatcaagctttactccaagggcgtgaccaccagggaaatagccgatctaattgaaaagatgtatggcagccattacagtccagctcaggtatcaaatatttccaagcagatgattccaaaggttgaggcttaccacaaacgcaagctaagcgacaagtttttctgcgtctatttggatgcgacataccttcctttgcgccgagaaacatttgagcgtgaagcagtctatattgccattggcatcaagcctaatgggcacaaggaggtcattgactactgcattgcacctagcgagaacattgaagtctggacagatatgcttcaaaacatgaaatcccgaggcttaaagcaagttgagctttttctttctgatggtgttgttggcatgaaaacagccttggccaggacttatcctaaagctcattttcaacgctgtttggttcatgtcatgcgcaatatctgcgctaaagtacgcgtcgacgatcgtgaaaagatcatgaacgaattcaaacaggtgcatcaacagacaaacaaagaagaagccacagctgtcctgcatgacttctataccaaatggggcaaggtttacagccatgttatcagaagcttgaaagacatagaaccagatctgctggtcttttataactatcccaagcagatcagagcttcaatttattcgactaacatgattgaatcatttaacaatgtgatcaagcgcaaagctaagcctaaggcagagtttccaactgaacagtcgcttgatgcttttattggcattcaggcaatgagctacaatgaccgttatttcaatcgaattcataaaggctttggtcaggttcaggacaccttagaatcctactttgattaaataaataattaaaaaatcaatttacgagaaagaactatttacacaaaagatttgacagtttcgtagaaaatgaagccaaacttcttattatgcttgactttacgtagaaaaagacctaaaagtgtctaacttttaggtctcagttcagtgtcaaaaatgacacctttttttattttgaattaaagtttatcagcaattatatccattccattttctctgagaaaatttgatattgttttggctttctcaagtttattattgagaatagattcatagtaattagccattattttagcaaaacaatttttaggatcaattgttaaagaattcagtattttaactgaagcatctatattagtatttataatacgttgctttttttttatgaaataacttaaataattaactaagattgcggatattattttttgcttttcttcaggaagtgaatttatattatgggtgttctttataatattttttacaacagaatttatttcatttggatcaaaaatggacattgaaatagcaaatagtcttaagctattttccgtccaattatctgtttcgaatatagttttctttatgtattgtttttcatcattagaaatctgggctaaagtatttgaaattgctgcttttataataataatttgtgccctaatattatccaaatttagttcactattgtttctatcgtttagcattttttctaattctgttattttcgacaaatctttttgatagtaagctgtgtgtaataaattatcacaatcaattttagatatgtgatttttattagtattattttcaacctttttaaaaaaagaagagtaatcaatattatgcaaacttaaaatttgtaataaatcatttgctctaatactacaaatatcgcgttccactttagagtaaaatgatttagtgagtatgttgccagccattttactttgacttagatttaattgttttctttctaacttcaatgcctcgccaattttcattttctttcctccaatgtcggataatgactaaatcatcatttgctttctgatataaataaatttacgcgtggtgctagttaaatcgttttagttaataaaaaagtccaatcttgttagactcgacttgtaaatagtaataatagaaaagagtctgatctgattgaactgccttaagcttaagcgttttagccaccatttacaagttagttttaaagatttagtgataatttgtcggcactggtatcgtttgtatgcaccggctgagtttactcatcggcgaaatattgatcaaattaaaactacggacagtctgattttggctttacttatctggcaagctaagacaggaattgaatcacaaagaagattctgtgaatgtttcaattgtttatcacactcacgttttaatcggcgttcacgtcagctattgcaattgatttatcagatacggcaagaaatgaataaaaaggttgacctgaatggacagttcttgatcattgacagctttccggtacctgtttgccaaccaattcgaaactatcgtgctaaaatttttcgcggttatgccaacattggttataaggccaccaagaaaatttacttctatggtttcaaagttcatgccattgttagcgatgacggttacattcttgattatgtcgtaacaaaggcatcagttcatgatgccagggagacagttgaactgatagaaaatacccatccatctaattactatcttcttggcgacgaaggctatttaggcaaagaactgcatcaacagctaaaacaaatgggttacgaactttggacaccatatcgtaaaaatatgacaggagctaaaaagcacaatgatcatcaattgatggctattcgcagaacaattgaaagcgacttttcgcttctgacctattacaatgccgagaacaatcgagcacgtagtctgataggctttcaaagccggttggaaattgcaattttagcttataatttggcttattgtctagaacgatttaactagcaccacgcgtataaatttatgcaattgaaattttatgtcctgaaaagtatagggtaaattattcaagaataagatactaaatatttagtatcttattttgcatacaattaggctgaaaaaacacaaaatactaatgttataattgattttagaacttaacaagaaattagggaacttttatgaaccaattatatcaagaaattaatgatgctttatatcatgtatattacgggattcagcggattgaagaagaagaactaaagaaaagtcgtttcaatgatcttactcctaaggaattgcatgcagtagatgctattactatgtatgaacatcctactacttcgcaagtagcagaaaaattgcatttgtcacgagctacaatgactgtgactgtcgatcggctagttagaaaaggctatgttgaacgaatccgaggtaagcaagatcgtcgtattgttcatttaaaattgacaatgcgaggcagagtagtgtgccgagcatatcatgcttatcataatcgaatggttaaaagttttttgcaaaatctagatgagaatgaattgcaaacaatttatcatgcatttaaaaatctggatgagtttttgaactcacactaatattattttgaaattgcttaagcagactggagatattcagtctgtttttttgtggacgaaaaaaatttaattacatagaagtgttcttagtattagtgtaaatagaatttttgagttctatatgaacttgtaatgtgttgacaataaaaaaagagatgataagatttgaatatcgaatagttagatatactaattttaaaaaacgaacatggagatgaagttatgccaatgaatactgctgagattcaaagcaagttagattgtcaagctcccttgatgctgttagatcgagttacaactttgaataaagatcaacaagtaattgctcaaaagagtgtgagtgctaatgaatcttattttcaagggcactttcctgagaatccaataatgccaggtgtgctgctaattgaagccatggtggaggcaacacaatttatgtgggatcggtcagatttgattcttactagagttaaaagaggccgctttcgtgagatggtcaagccagggatgcagttgacaattaaggttaacgccattaaaaaatacgcatgtcaggcaaaggttttaattgatgataaagatgtttgtgtagcagacttggaatttaaggtaacagaagaaaattgaaagatgtaaaaattatagcaactggttttgctgtgcctgagcatgtcgttactaatgatgatctcagtaagatcttggatacttcagatgaatggattgttaaacgaacaggcattaaaaggcggcatattagtcaaaatgaaaatacttcggacttggcaactcgtgtagcaaaaacattattgagtcagagtaatgtaagaactcaagatattgatctgatagttgttgcgactatgacacctgataatatgacaccagctacggcagcgattgtccaaggcagaatcgctgccgaaaaggcggtatgttttgacatttcagcggcttgttcaggcttttcttatgctattagccttgctagaagcatgatgcttaccaataattggcgtcacgcaattgtaattggcgcggaggttttatctaaattgctagattggactgatcgctcaacggcagttttgtttggtgatggagctggtggcgttttattaagtcaaagtaatgccactcatttattgggacaaagtttaaaaacttatggtaataaaggtgatcaattaattgcaggtcatttagatgtttcttatgacattttgaaaaataaaaaaagctatcagcctttaccatgaatggacaagagatatatcgttttgctacgcatgaagtaccacggtcaattttgaaagcttgttcaaatgcacaaattgaacttgatcaaataaattattttcttttgcatcaagctaatagtcgaatcattactcaagttgctaaaaagttaaatcagcctttaagcaaatttggtgtaaatattgacgagtatggaaatacagcggctgctagtgaagcaattctgctggctgaaataattcagaaaaacagaattaagccaggcgaaatcattgctttaagtggctttggtggtggcttaacaacggctacattgattattaagtattaatacgaggagaataaaaaatgactaaaaaagaaattttaaaagatgtacaagaaattgcccaagatgaattagatgttgaaccggaaaaaatcacaatgactaccaacatcaaagaggatttagacgccgatagtctagacctttttgaaattttgaatgagttagaagataaatacgatcttgatttagatgctgatgagagcatccaaacaattggccaattagttgattttgtacaagcagaaatggataagcaaaaataatgagttacggtattctgtttagcggccaaggcgcgcaaaaagcgggaatgggacttgattttttagacgatgatctatttaaagaaacgattgaaaaagcaagtttagctagtcaggaagatttggttgccattcttagagatgaaaatggagaactagataaaacaattaatgttcaacctgctctagtagcctttgaaataggaatttttcgtatgcttaaaagagactgtccccatctaaatattagtagaatggttggtctgtctttaggcgaatatagcgcaatgtatgccagtggtagtctagatttagaaaataccctgagcttagtcagtgatcgggctcgttatatgcaagaagatgctgatcagattgaaaacggaatggcggctattttaaaacctaaactcaatgatattgaagttttaattcaaggcctgcaaaagcaaaacaaacgagtttatattgctaactacaattcgcctaaacaagtagttattgcaggtgaaaaatgtagcgttgcattagcttctaagcaaattaaagatcaagatttggctaagcgaattattatgctaaaagttaacggcgcctttcatacaccactatttaataatgcaaaaactaaaatgacgaagcgattagcaaatataaagtttcaagaaagtaaaactccggttatatctaatacaactgctctgccttttagtggaaattggcgtgagattatggctaagcaattaacagtccctacgcattttggctcatgtattcaatatttagttgaacatgagcaaattgatcaaactttagagattggtccaggcaaggtgttatcttcatttgctagacaagtagatcgtcacttaaagtgtagccatattggcaattatgcagaatatcagacttttgtagaggaagaacatggaattaaaggataaagttgtttttattacaggctcaactcaagggatcggcgcagcaatggcagttgcatttgccaggcaaggcgccaagcttattgtgaatgggcgaaaacaagagttgcctaaagatttaaaggatgcattggataaagagaatgctgattatcggtatttatcagcagatttagcacaggacaatttagaggagataggcaaaacagcctggaatttatttggtaagatagatgtcttgataaataatgcaggtcaagcaaaagataaaatgttcattggtatgcatgatgctgatttcgaagaggtattaaatttagatttgaaagtaccttttttcttgagtaaagcaattatgaaaaggatgaataaagagcgttccggggtcatcatcaatttatctagtgtagttggcttacatggcaatgtgggtcaagcaaattatgcagctgctaaggctggtctaattggttttacaaaatcaattgcacgtgagggagcgttaagaaatattcgagttaatgcgattgcaccaggaatgatagatactgaaatgacacaaaaattgtctgaacgtgttaagaaaaatattttggaacagatacctttaaaacgtttaggttcaactaatgaagttgctcaaggagcggttttcttagtgcaaaatgattatgtgacaggacagacaattgtaattgatggtggaatgaccatttaaagaggcaatatgcaaagagtagtaattacaggaatgggggccattgcccctaatggtaatggtgttgaaaattttgttcagaatactttagcaggcaaagttggcataaaaccaattacgaagtttgatgcatctgaaacaggaattagtgtagccggcgaaattgatgattatgacgaaaatgattatgttggcaaaagagaagcaagaagactagatttgtattctcaatatgctattcaagttgctaatgaagcgatggaaatggcagggattgatgaaaaaaatactgccccggaagatttaggcgtgatttttggatccggaattggtggattgactactattcaagagcaagtaattcgcatgcatgataagggacctaaaagagtatcaccactatttattccgatggtaattgctaatatggcagctggaaatatctctatccgttttaatgctaagaatatttcaacttcaattgtgactgcttgtgcttcaggaactaattcaattggtgaagcttatcgtcgaattaaagaaggtgatgcacaggtaataattactggtggatcagaggctactattaatgaaacagcaattgctggtttcgcagccttaacagctttatctactagtacggatcctgatcgagcatcactaccatttgatcaaaaccggaatggttttgtgatgggggaaggagctggagcactagttattgaaagtttagaacatgctcaaaatcacggtgccaaaattttaggcgaaattgttggctatggcacgactagtgatgcctatcatattacttctcctgatcctaaaggagttgaagcagctcgttcaatgaatcaagcaattgtacaggcaaatattgatcctagtcaagttggatatgttaatgcacatggtacagctacacatgctaatgatgctggagaaagcaaagcgattaaccaagtttttggaaaagatagttcagttttagttagttcaactaaaggaatgacaggtcatttattaggagctgcaggtgccattgaagctgtaattactgttgccagcttagaaaaaggaatcttaccaccaaatgttggttgttttaagcaagatccagaatgtgaagttaatctagttaataaagataatcaacagcaagatattgagtacgcaatttctaattcttttgggttcggtggacataatgccgttttagcttttaagaaatggagcgagaattaatggacttagaaaaaatacaagctttaatgaatcaatttgaagattcagatttacgtgaattgaaaattgatgatggtgatttccatttctatttaagtaaaaacaagaataaagttactcagacagtacagccgactgttcaaaagaccgctaaaaaagtggaagaaacagctcaacctgttgttcaagagaatattgacaccaaggttaaaccggttaaagcacctatcgttggagttgtttatttgcaggctaaacctggacaaccagcctttattaatgtgggcgatcatgttaagaaaggcgacacaatttgcgtgattgaggcgatgaaaatgatgacggaagttaaaagcactttaaccgggactgttagtgagataaaagttgaaaatgaagacctggtcgaagtagggcaacctttaattactgttaaggaagattaatttatgagtaaagaactagggattgacgaaattaaacaaattattcctcatcgttttcctatgctgttaatagatcgcgtcttgtttctaaaagttggtcaggaagctaaagcagttcataatgttagttttggtgaaagctttgttcaagcaagttcctctaaagatccagtttttccttctattttaattgttgaagccatggctcaaacaggtgcagttgcattattgagcaaggcagattttgccggcaaaaccgcgtattttggtggaattaaggaagcaaatttcattgttcaagcaaggccaggggatcagatagttttgacaacaaagttaactaaaatcagaaaaaatattggcattggcataggtgaagcgtgggtaggcaataagaaaattgcacaagcagaactaacgtttatgattggttaggtaaaatgaatgtttaaaaaagttttaatagcaaatcgtggtgaaattgctgtccgtattattcgttctttgaaggaaatggggattaaaacggttgccatttattcaactgcagatcgagaaagcttacatgttcaattagctgatgaagctgtttgcgttggtggcccgcaacctactgagtcatatttaaatattaaaaatattttagcagcagccgtaggcatcggggcacaagctattcatccgggatatggttttttatctgaaaatgcagaatttgctcaaatgtgtgaagattgtggcttaacttttatcggccccaaggcggaaacgattgatcaaatgggcaataaggaacatgcgcgtcaattgatgatggcacacaatgttcctgtaactccaggatctaatggagttattaaaaatgctgaagaagctaaaaaaattgctgctcaaattggttatccagttttgattaaagcaacagctggcggtggaggcaaaggaattagacaagtaactgatccaagtcaaatggccgaagctttagcggctgctcaaagtgaagctaaaaatgattttggagatgatcgaatgtatctcgaaaaggtaatgcaaaatgtaaagcatattgaggtgcagatttttcgtgatatgtacggtcatacggtttatttccctgagcgtgactgctctttacaacgaaataagcaaaaagttttagaggaaagtccttgcgatttaattacggaaaatgaacgtaaagaattgggtgaggttgcggttaaagctgcccgagccgcaaattatgttaataccggtacaattgaatttttgatggatcaagatcatcatttttattttatggaaatgaatacgcgtattcaggtagagcatactgtaactgaaatggtaaccggtgttgatttagttaaagcacaaattcaggttgcgaatggaggaccactgccttttacgcaaaaagatttacgggctaaaggtcatgcaattgaatgtcgaattaatgcagaggatccagcaaataattttatgccatcaattggtaaagtttcgtacttatatttaccagttggcaatccggggatgcgcattgataccgccttatatcagggacaacaaatttctccttactatgattctatgttagctaaggtagttgctttgggcaatacacggaaagaagcgattgctaagatgaaacgcttacttgaagaaatagttctgcaaggtattactaccaatcaagaatttcatttaaatatactaaatgatccaacttttattaaaggtgactttaacaatacttaccttgaacaaggctttatgccgcaatggaggagtgaaataaatgaaactatttccgcataaaaatactcctactgatacacatattaaagcaaataaagcggctgatgatcgagtacctgatggactgctgcgcaagtgccccaaatgccatcatgaaatatttgcgaacgaattaaataaattctatgaatgtccatattgtttttacggctttagaatctctgccaaaaaaagattatcgtggttagttgatcaagtacaggaatgggataaggatattgagtcctcgaatcctttaaaattccccgattatcaaaagaagatcaaacatgctcaaaaaattagcggcttaaaagaatcagtttggacaggcttagctaagattaaccaaacgcaattcgccttggctattatggatccaacttttattatgggatcgcttggtcaaatgactggtgaaaaattaacgcgtttgtttgaaaaagcaacgcttcagcatttaccagtcgtactgtttgcggcttctggcggagcaagaatgcaagaagggattcttgctttaatgcaaatgggcaaggtatctaatgcagtagctaggcatagtcaagcaggtcttttttatttagtagttttaacagatcctactactggtggggtgacggccagttttgctagtcaaggagatattattatagctgaaccacatgctatagtgggttttgctggtaaaagagtaatcgaacagactattcatgaaaaagtagcggcagatttacaagatgcagagaacgttttgaatcatggttttattgaccatattgttagacgctcacaggaaaaaagaatcattgaatggttaatcaaggtaggtggctatcatgactaaaaatgcaattgatatagttaaagctgcaagagatgaaagtcatatctctggtcatgagatacgcaaacttctttttcccgatttttttgaattgcatggtgatcggtgtggtactgatgatcctgctatagtaggtgggctagctacttttaatcaagagccagtaacagtaattacaactagcagaggacatttacttaaagaaagaattcaaaaacactttgggcagcctgaaccaggtggttatcgtaaagttctgcgtttaatccaagatgcaggtaagtttaggcgacctgtttttttgtttgttgatacagctggcgcttatcctggtaaaagtgcggaagaaaacggccaaggacaggcaattgcacaaaatttgcttaaagttagtcaaatacctactcctattattacggtcatgtatggagaaggcggctctggtggtgctttagcgcttgcctgcggagatgaagtttggatgttggaaaatagtatttattctgttttatcgccagagggctttgcttctattttgtggaaagatgtaaaaagagcaagtgaagcggcggaagtcatgaaattgacgcccgatgatttactcaagatgaatgtgatcgaaggtatcatcgccgaaccggataatcatcaagaggtttgtcaaaatatagcagaaaagctgcaaagtgagataaacaaattaagtaaattatccgaggcagaattgcttgctaagcgatacgaaaggtttagaaagttttagaggtaaaaaatgagtggatttttagcaggaaagaaaatcttggtaatgggtgttgccaataatcggtctattgcatggggatgcgctcaagcaatggaaaaacagggagcaaaaatcatttatacttaccaaaatgagcgattaaagaaatttattagcaaattagttactgatgaagattgcctgattgaatgcgatgtggcaagtgatgagagtattggacaggcttttggtttgattcaatctcgttttggcaaaattgatggcattgttcacgcgattgcatttgctgagaaagaagaattaggtggctcaattttaaattccacaagagagggattcagccaagcagttgatatttcagcttattctttcttggctgctgcaaaagctggaatcaaaatcttaaataatcctgcaagccttgttactttaacctatatgggatcagaacgtgccttgcctaattacaatactatggggattgctaaggccgctttggaatcggaaatgcggtacttagcgcgagacctgggtgaaaaaggtgttcgggtaaatgctatttcagcaggagctatgcgcactctggctgtctcaggaatccagggtcatgcatcattattgaagatttctaagagtaagactgttgatggtgttaatgtgacacaagaagaggtaggtaatacctgtgcttttttgatgagcgatttggctagtgggattactggagatgtaatttttgtagacaaaggtgtacatttacgctaatgcaaatttacaaatatcgaaaggttacttcaacacaagatcttgcaaaaaaatatttagcaaataaagctcaagaaattgctgcatttatagcacaggaacagacggcaggttatggcaagaggggacgctccttttattcaccagctaaaacaggtatttatttaagtattgcgcttcctaattttaagtttaaattagagcatgcaggcttattaacaatagctattggggtagcggtagttcatatactacaagaacaatttccttcgtatgaatttcgtttaaaatgggttaatgacatttatttaaatgataaaaaagtagctggtattctaaccgaaaaaataggattaggtttggtaataggaataggggtgaatatttttacggcatctttcccaaaaaatatctcaaatcatgtcggcagtattgtacaagctgattatgcttttgagaatatgaatgagcagttaattcgagctgttgtgcaggctgctaatacatatcaaaataataaatttttagacgagtatcgcaaaatttcttatctgaaaagtaaagttataactttgaaaataaatcattattatgtaacaggtcgagtagtgacaattgatgatcaaggacggttagttattagttgtcgaaattctacacgttgctattcaagtggtgaagttattaaggtggaattagaacccggatttaagggtaaacagtaaaatagtacaaaaaaagacttgagaagtaatttttctcaagtcttttagtttgtcttaatttaggttaattaaaacttgttcttgtccaaagcaactggagaatctggcttttcaccattgatcatcttcaagttgttgtcaaatgccttaacaaccatgttacgtacagcgtgggtggtgtagaaggcggtgtgtggagttaccaaaacgtttggacgatcaattaagtcagctaaacgcttgtctgggaattctttaccttcccaatcttcgttaaatacaccaacttcgtcttcgtaagtatccataacaaagccaaagatcttacctgagtccaaaccgcggataacagcgtcagtgtcaacaagtggaccacgtgagcagtttacaattacaacgccatctttcatcttggcaattgattcgtaattgatcatgtgtacatttgctggaacatctggtacgtgaagtgaaattacatcagcttgcttgtacaagtcgtcaagtgagtcaacgtagtaacccttcttttcgagttctgggttcttgaagatatcgtaagcaatgacctttgcgccgaaaccttccataattctcataaatacttgaccaatgtgaccagtacctacaacaccaacaacttggtcacgaacttcacgaccaatagtaggtgcccaacgtaagtcgcgcttagccatcttttcgtccatacgcttgtcttgacgtaatacacgagcagcttggattgcagcatgttcagcaatagcgtcaggagagtatacaggaacgttagtaatttcaaagccaagttccttagccttgtccatgtcgatgttgtcgacaccaacgttacgtaatgacatcttagttacgccagcgtctgccaatgcttgaagagtttctggggtgtagtctaattgttggtaaacaacaacaccgtcagcacccttagctaacttagcagtttcaggagtcaaaagcttatcagtgtaatctacatcgatatccttgtgagcatccttccattcgtttaagaatggttcttcgtctttacgaatagcgtaagcaaaaatctttgtcataaatttaacctccgtaaaatttattagtatgaccagtcctcattatacgcttttacttgctcaacaaaacacaaaagaaccatttttttgtatagattttaagaaaaataaaagtcaagttttactctgagcaaaaaagttgcaattttttcaaaaaaagtttatagcctaaaaattgcaactattattaactgttacctaatctcaatcccatagatatgaaaattatttttgtatatagcaatattagttaaaggtagtatatggatttgtataagagacgcattttcgttatataacccaggttatataatggactttaagtagagaaacaaacatagcggaggaaaattgaatatgcattttaaaggagaaagccaacagcatttcagcctaagaaagctgacaattggtgttgcttctgtaataatcgggaccacctttatgttttttggtggtcatgctgttcatgcagatgatttaagtagagatgctgagcaaaccagctcagttgttcaaaaacagagtagtgagaaaatagatgtagatgcagtcaaagaagctgataatgtttcaaatcaaagacaagacttacccagacggtactaagagtaccgcaactgttcctgtaactgtcattgcaccaaatgtaccagacgttatctacgtaccaaagggtgacaagtttccagacccaagtactgtagttactaactctaacgatatcaaggacaagattcctgacacgacttacacttggaaaactactccagatactccaaatactaaagtagtaattaactataaggctaataatcctggtactccagataccccagttactccaccagtggatccaggcgataatccagcaaccccagttaccccgcctgtaaagccagagcagaagccaacaacaccaactcctcatgctactaagacaccagcaaaggataatggtggcaagaagacagtagctagtgagcaaaaatctactttgccacaaacggggaagaaggataacgttgctttgactgctatcggtgtagctattgcagctgctggaagcttattaggattagcagatagcaagaagcatagatcttaatttgtaatatctaatttctgtttactaagaagcaagttgactcagataggagctagcttgcttttttgtctaaaagtttaaggatttctaaagacaaaaagcaaatagtgacgcattgtcataaagctgatattatatactcataacaaaaatacaacgcatcaaatagagatgaattgtaagaaggtaacaaatcttctaattccttattaatacatcctattgggcctttattaattcatacattgggtattgctttttgctggttgtcccctatgcaaccgcgaaagttaagattgataataagtccatcccctttttgcgaaggtaaagagtcaagaccccctgcaacatctcttgcgttgaatcttttgttaatcttgataatttatcttcgcaacattagtgatgagtaggctaatgtaaaaaaatctcgttattctcattcaacacaactcccttaaaagggctggtttagaaaagtcatctaaatcagtcctttttctttttttcgttataattaaacttgagaactaaaacaaaggggaagaaaaatgatcttaatttcatggaatatcgattcattaaatgcagctctgactggtacttcagctagggcggaagaaacgcggcaagttttaactaaaattcatgatgccaatccagatattattgcgattcaagaaactaagctgcgtgcaactgggccaactaaaaaacataaagaagtgttggctgaaaagttccctgagtatgactatgtttggcgctcttcagaagaaccagctagaaaaggctatgctggtacaatgtatctttataagaaaggattaactcctgtagtgtctgagccgattattggcgcccctgagccgatggatcatgagggacggataatcacactggaatttgataaatgctttgtcacccaggtttatacgccaaattcaggcagtggtttaaagcgactagctgaacgtcaagtttgggaccaaaagtatattgaatatctgcaaaaattagatgaaaaaaagccagttttagctagtggtgattacaactgtgctcataccgagattgacttgaagcatcccgaaaataatcatcactcagcaggttttactgatgaagaaagagtcgactttaccaatttgctcaatgctggctttaccgatacctttagaaaagttcatggtgagattactggcgtatattcttggtgggctcaacgtgtcagaaccgctaaggctaacaactctggctggagaattgattactggctagtaagcaatcgcattgctgataaggtggtccgctcagagatgatcgatacaggcaaacgagcagaccactgcccaattttgcttgaaataaatctttaaattgaagcaagccctagtataatttctttttgaaatgtttttattttgaaaaagaagtaggggttgaaattctttgaataacgagaaaaaagaagattgggctttggagcaggatctgaagtacaatcgtctgacagcatttaagctattcgcgatgactagttcaatggttatttccgttgatgaactcgcaccatttggtaaaactggagcaacggcactgttttacttgttaattgctggaatcgcttggtttatcccgattacgcaaatggctggagaaatggcctcaattgatggctgggaaaaaggcggaatcttcacttgggtgaaaggatctcttggagacaaaacaggctggacagcaatgttttatcaatggattcatattactgttggtatggatacgatgatgtatgtgatcattggggcattgtctatcacatttgggacaccttggttcaacaccacgccaatcgtacgcttcattttaatgatggttattctgtggggagcaacagcgattcaggtaattggtgttagaaagattggtcgaatcgctgaatggctgtttattctggggattgcgacaccagtaattttattgattatttcattcttcgtatatgtgattcaggggcatcccttgcatatgacgattaactggaatactgtaattccacataaattgaatggtaatacattagttgcctttgtcccatttatgttggccttttgtggtggggaagcttctgcaccgcacgttaaaaacttggaccacatcaagtcatactcaaaagttatgcttggcttagccgttactgcaatctgcttcgacttgctaggtagtatggcaattggaatgactgtgcctaaggatcaaatagagaacagtacaggctttgtttatacctatggcaagctgttaacgtcaatcgggctacctggtgatctgttgcaaaaaattgtgggtataatgttagcctgcggtattattggtgagctaggcaactggattgctggtcctaatcagggaatgtatgaagcggctaaagagggctatatgcctaagttttttgctaaaaccactaagcacggcgtgccattaagaattatggttttacaatcaagtatcgttaccatttctgcattattgattacttttaccagtggtgccgatgcagattttgcgtttaacgtttcattggccgcaacgacggcgcaatatctcatggtttatatgattatgttgattgcttacatggttttgaaaagaaagcatgaagattatcaccgtatgtattacatgagcaagaaccctaatttgagtattgcaattgcggtgcttgcattaatcatcacggttatagctttctttgtaacttttgttccagcacaaggcacgccaagcaatttgcgtcacgtttatgtttggaccttaatcggcatgtgtgccattgtgtcgattttgccacttattttgtatcgctggcatgaaaaatggcaatcacaatagaattaagaagcattcgtttttcaagacggatgcttttttagtagaatttgagagaggtgaataaaatggcggatgcgatgagggatgcaatattaaatggttttgttgatcaaaattatttaggaagtgaagaattaggtcctaaaatattagctaataatcagcaagagagaatctggcagaatttgcgccaggaattgtatagttgcaagtcctttacttgggcggttgcgtttattacgcaagacatgctagttccgtttaaggtgataatggcagatttagcgaaaaatggaattagtggcacgattattactggtgattacttgggttttaacaatccgcgtgtttttacggaattacaaaagattcctaatttagaagttcgtattgctaataaggcaggtttccatactaaaggatatttatttgatcatgaaaactatcaaactgtgattattggcagtgctaattttacacgttcagctctgctggctaactatgagtgggctttgaaagtaagttcaaaaaagcaagcagatttaacagctcaattagtggataaaattgcagatttgaaacaggatagttttgttttaaattcagcctggctaacagattatcgtaaaaattgggtaaagcctgagcgagttgctactgatcggcatcagacaaaaattttaccaaataaaatgcaaaaagcggctttaaaacagatagaagcactagttacaagtggtgaaaaacgagggctagtagtgtcagccacaggaacggggaaaacttatttaggtgcttttgctgttaagaaatatcagccgcggcgttttttatacattgtgcatcgtgagcaaattgctaaaaagtcattagaaagtttttatcgtgtaatcggtggaccaagatcggattatggcttattaacgggaaataggcacaatttacaggccaagtatttatttgcgacggtacaaacgataagtcaacctgagatgctggctaattttaatagcgatgaatttgattatatcttgattgatgaagcacacagggcagctgcaccttcatatcagcgccttttacattattttaagcccaatttttggttaggaatgacggctacgcctgaacgaatggatgagcaaaatgtttaccagatttttgactacaatttggcatatgaaattcgtttgcgggatgcactggaagagaagatgctggcgccatttcattatgtgggtgtccaggattatgaagcagacggagtagtgattgatgaaacaacagatttacgctacctagcttctacatctcgagtagactatgttttaaaggaattagactattacggctattgtggaacaaaggctaaaggcttggttttctgcagtcgacaggatgaagcacgtgaattagctcggctttttagtcaaaaaggacatcccgctgtagcattgaccaatgaggataatgaaaaaagacgtaatgaagtggttgcgtctttagttaaaggtgagattgagtatattgtagcggttgacttgtttaacgaaggaatcgacatccctgccttgaatcaaattgtgatgttacgcaacacacagtcgagcatagtgtttatccagcagttaggccgggggcttcgtaaatatcctggcaaagattttaccgttgtgctagattttatcggcaattataaaaacaattacatgattccgttggcactgaatcaggatacttctcgaagcaaagatcaagctaaacgagaaacgcgtctgccaagctttattgatgtttcaacgattaactttagtaaaattgccagtgaaaaaattttggcttcgcttgatagtgtcaagcttgatgggatgcgtgaattgcggcagagttaccatgatctcaagaacaaactagggcgtgtaccgctactatttgatttttatcaatatggctcagttgcaccgattgtttttgcacaaaatcatggcttggcaagctatgctgactttttgggtaaaatgggcgaagacgttaatttatcaaaatatgaaaatgaagtgctgtcttttgtgactaaggaattacttaatggtaaaagaattcacgagttacttttgttagagatgctacttgaacaagatattgttaagcaagaagattatctagctcaattgaaacgacaccatgcttatgtaaatgatgaattgttagcttctgttgatgcgattttatcgctagatttttttgatattaagcagggaaagactaccaaaaaagcacaatatggtaaattgccgttagttgaacgtagcaatttatttgactatcaattgaatggttctctacgctctgccctagatcaacatgattttaagaatttatttgttgatgctattaaaactggtttggccttaaatcaggaatatgataatcagcgtcaatttactttatatcagcaatatgatcgtaaggacgcttgtcgactcttgaactggcctaaggatgtttcggccccgatgtatggctatcgtgttggtgagcaggacacaccaatcttcatcacttatcataaagatgatcatgaaaagcggaatgctctgtatcgtaatacattggctgatgggcgcagtttgcgctggtatactcgggtaccacggcatttagattctgatgaggtacagcgtttgcttaatacgcgagggatgaatttgcatatatttgttaaaagaagcgatgcagatggtaagcagttcttttatttaggcaaggcaaagattcaagctgattctgttcgcgaagaattgctcggtgttaagaaaaagccagctgtagggatgaacttaatgttgaaacatccactgagtgagtcaatgcatgagttattatttgaatagaccaaaaaagcctttccgcttaggaaaagcttttttaattgccgctaatattaattagatcttggtcatcttggttattatccttatcaaacattctaggcttgatgtgatctagaatcttagtcccgatatttttctgagcagtttcatcaccgctaacctggtttaaaaacataattattccatatcgattatctgtagtcattttgatccaattaccaaaatgagtgttgcttaagctaccataagcagatttagtatggtcatcatctaaatgaagccctccagaataattagtggttgcacttttaagatgagttaagtaatagaaatcggatttgcttaagatactaccattggttaagccaagctggatcttgtaataatccattggggtagtgaacatattgcctgcgcctggaagctgggaggcaagagtctttttaacgtattcagcgtcttggtaatttttaccattattccagacgtaagagataggatcggttttccaactaggaatatcctgataaaggaatgtattagcaagccctaatttgttaatgatgcgattattgaaattgttttcgtaggattgtccgctgattttaataataattccggctaataaaagatagttggtattattgtagaagtaggttcctggtgtcccttgagtgccgttattagtattatcaatagcccaattgatggcgtcattctcacttaaaacttttccgcgatccaattcagtattggttgcttgaatgccagaagtatgggtcattaactgtccaatagtaatattatcggcgttcttaagattagggtaccaacgtgaaattttggtgttttgcgtaaatttttgactagtgtgccagttttcattcatcagctgaattatcattgctgctgtaacaactttttgcaaagaagcagttggataaactacgttgtcgttcccattaccaacttttttaccgtaccaagcgtagccatagctgatttgttgcggctgaccgtttttgataatgacgatactaccgcgagtattgttttgagccaaagtattgcggacaaaatttcgcatttcggttttaaagtatgaactggcttgaacttgtggtggttcagtgatcgcaaatgcaggaactgtcgttagcagcgcagcggtagctagtccaataattgattttttcaaaaattaaaaggcctcccttaaaaagtggtttgtttacattttagcgcgttctttgcatcggacaaactattatcttggtgaaaagacgtatttttagctagcttgttgaaaaagtgcggctaattttgctctgagtgcgggatcatgagcgtataaataggtaccgcggattcctcgcttgaatagaacgttgagtgaattcatgaccatcttctcttcatattctattttttcttttgagttggttagatcattacgctttttgaacatctcaacatctgtaattttgtctaaattaactttaagttgattggtgcggggaatcaggctgattggtggaccgataatgatgccagcataatttaggtcaaaaccttggcaagtatagatagaaccaacttcattgattgttgtaggaatttctgcccaaggagttgatgtgtagttgtattgatcccatggcagcataaatttcccttctttaatgtaatgtttgccaccatcaagagtagatggatagccggaagttgaaagaattcttgccaggccgtctgtttgatttctcttgacgatttcttgccgcattttttctgcatcagtaaaaatacgaaagtcgtagttgtgccacatttctttttttaagggcattaatttattatgtgtaaaaaagttaaaccattctattagactatctggtgccatcattctaaattgatgatgtagttgatagtcttcgtggggataatgatgagtaattgcttcaagtcgcttacgtgtccagaagcttttcattcgtaaaacttggttttcatcaaataccaaaatgataacttttgaccgcttaataacctcctctaattggttatcgtgataaaagttgttgtagtgatcaggctgagataagagcaagtgtgcttcatcaatgacgacaacatcagcactggtttgttttttgtccatctgattaataaatgaagttggccgcatataatttttcttatatagttctttaatcggcccagcaatctgcttatagacttttagcagttcagggtgatttactaaaaagtagttttgagttttatacagttggctgcctgtttggtggtttaatttttgcaactgatcaaaaagggcagaaagcactacacttttaccagtacctgcttcaccataaatagtgaaaacagcaggatgatttttattgctgcaatgtgtaatcgaaaaatgtaaaattttttgtacgagaagtgattgctcttggttgagctgatggtaaggagagagtttaaaacttgcttgattattcaatatttattcacctcgttttcaattataatgaatagaaataataatgataaaggaagaaaacatgactgcacaaaaaataattcacaatcggctatttttaagacaaaaatctgatttagctggcaaaaatgatttacaagttgcgataaacttgcgtgatacgctactagctaatcgtgggaaagctgcggggctggctgcaaatatgattggtcagactaaacaaattattgcgttttatgctggcccgcttccatttgtaatgctgaatccgcgtattattcaaaaaaagcagatgtatcttgctagtgagggatgtctgtcactagaaggcgagcgtaatgttcagcgctatgaagaaattactgttacttatcagaatatggagttagaaacagtaacgcaaacttttggtgactttatagctgaaacgattcagcatgaaattgatcattgcaatggaattctgatttgaatagtagaatatttacgtgattttgcaaaaaaagtaaaaaaatttaaattaattttgcatggtttcagggatgaaaacccacaattttcgaataattagatttgatagaataaaatactttttaatttaatgcaaagataaagaaaaatatattacaacactacctagtgtatcgtgaagaacccgaacgaagagcaagacttgccaaagcggagaaaataaggtaaattaataaagtcgcttcgagagatgcgacgagagcttaaaaacagacatgcaaggaaagaaaacaaataaaaagaaaaaagtacttgcaaagaagtaaataagctggtaatatatttaaatgtcgtcaggtgaaagcagaaaaagcttgagtaagacgaaaaaacaaatcaaaaaagttcttgacaaagaaatgatggtttgataaaatatgaaagctgtctgctttgcaaaaaaagcaagacagaggtagtactttgaaaactgaacaaagtttcgctaaaagtgtgcgggtgtaaaaacccaaacaagaagcgaagtcaattcgcgagcaataaatttgagacaaagatcttaaataaggaatgagcaatcattcaaactttttaaaatgagagtttgatcctggctcaggacgaacgctggcggcgtgcctaatacatgcaagtcgagcgagcggaactaacagatttacctcggtaatgacgttaggaaagcgagcggcggatgggtgagtaacacgtggggaacctgccccatagtctgggataccacttggaaacaggtgctaataccggataagaaagcagatcgcatgatcagcttttaaaaggcggcgtaagctgtcgctatgggatggccccgcggtgcattagctagttggtaaggtaaaggcttaccaaggcgatgatgcatagccgagttgagagactgatcggccacattgggactgagacacggcccaaactcctacgggaggcagcagtagggaatcttccacaatggacgcaagtctgatggagcaacgccgcgtgagtgaagaaggttttcggatcgtaaagctctgttgttggtgaagaaggatagaggtagtaactggcctttatttgacggtaatcaaccagaaagtcacggctaactacgtgccagcagccgcggtaatacgtaggtggcaagcgttgtccggatttattgggcgtaaagcgagcgcaggcggaagaataagtctgatgtgaaagccctcggcttaaccgaggaactgcatcggaaactgtttttcttgagtgcagaagaggagagtggaactccatgtgtagcggtggaatgcgtagatatatggaagaacaccagtggcgaaggcggctctctggtctgcaactgacgctgaggctcgaaagcatgggtagcgaacaggattagataccctggtagtccatgccgtaaacgatgagtgctaagtgttgggaggtttccgcctctcagtgctgcagctaacgcattaagcactccgcctggggagtacgaccgcaaggttgaaactcaaaggaattgacgggggcccgcacaagcggtggagcatgtggtttaattcgaagcaacgcgaagaaccttaccaggtcttgacatctagtgccatttgtagagatacaaagttcccttcggggacgctaagacaggtggtgcatggctgtcgtcagctcgtgtcgtgagatgttgggttaagtcccgcaacgagcgcaacccttgttattagttgccagcattaagttgggcactctaatgagactgccggtgacaaaccggaggaaggtggggatgacgtcaagtcatcatgccccttatgacctgggctacacacgtgctacaatgggcagtacaacgagaagcgagcctgcgaaggcaagcgaatctctgaaagctgttctcagttcggactgcagtctgcaactcgactgcacgaagctggaatcgctagtaatcgcggatcagcacgccgcggtgaatacgttcccgggccttgtacacaccgcccgtcacaccatgggagtctgcaatgcccaaagccggtggcctaaccttcgggaaggagccgtctaaggcagggcagatgactggggtgaagtcgtaacaaggtagccgtaggagaacctgcggctggatcacctcctttctaaggaagcgaaggatatggagagcaggaatgctaagagaagtatccagagcaagcggaagcacactgagaaactttgtttagttttgagggtagtacctcaaaaagagctagtacattgaaaactgaatataatccaagcaaaaaaccgagacaatcaaagagaacagattgtagagcgaccgagaagagaattcttgagtaaggtcaagtagaaaagggcgcacggtgaatgcctaggcactaacagccgaagaaggacgtgacgaactacgaaaagcttcggggagcggtaagtacgcagtgatccggagatatccgaatgggggaacccaatgcagagatgcattattgattagtgaatagatagctaatcaaaggaagacgcagtgaactgaaacatctaagtagctgcaggaagagaaagaaagatcgatttccttagtagcggcgagcgaagaggaaagagcccaaaccaagtgatttatcatttggggttgtaggactgcgacgtggcagtgtaagagatagttgaattatctgggaaggtaagccagagagggtgagagccccgtaagcgaaatctcaagcacgcctagcagaatcctgagtaggccgggacacgaggaatcccggttgaaaccgcgaggaccatctcgcaaggctaaatactagttagtgaccgatagtgaaccagtaccgtgagggaaaggtgaaaagaaccccggaaggggagtgaaaaagaacctgaaaccgtgtgtctacaagtagtcaaagcacattaaagtgcaatggcgtgccttttgtagaatgaaccggcgagttacgttatctagcgaggttaagtcagaaaagacggagccggagcgaaagcgagtcttaatagggcgaaaagttaggtgacgtagacccgaaaccaagtgacctacccatgaccaggctgaaggtgtggtaaaacgcactggagggccgaacccacgtaagttaaaaattgcggggatgagttgtgggtagcggtgaaattccaaacgaacttggagatagctggttctctccgaaatagctttagggctagcctcgtggagaggataatggaggtagagctctgtttggactaggggcccgtcaggggttactgaatccagataaactacgaattccagatatccatacacgggagtcagactgcgagtgataagatccgtagtcgaaagggaaacagcccagatcaccagttaaggtccccaaatctatgctaagtggaaaaggatgtggagttgcgtagacaactaggacgttggctcagaagcagccatcattcaaagagtgcgtaatagctcactagtcgagtggcgctgcgccgaaaatttaccggggctaagcatagtaccgaaactgtggatgtgttttaaagagcacgtggtaggagagcgttctaagagcggagaagttgaatcgagaggatcaatggagcgcttagaagtgagaatgccggtatgagtagcgaaagataggtgagaatcctatccgccgaaagactaaggtttcctggggcaggctcgtccgcccagggtaagtcgggacctaaggcaaggccgagaggcgtagtcgatggataacaggtagagattcctgtactgtgtcaaatcgttaagagcgaaggagggacgcaggaggtgaagcacgcatcgcgatggaacgatgttcaagcaacaagtgcggttaagagtcaaatgcttctaaccagcaacacgagttgtgaagaggagtgaattaaaagtagcgaaggtgtggtaatcacactgccaagaaaagcttctagccagagatgacatacccgtaccgcaaaccgacacaggtagtcgagtggagaacactaaggtgagcgagagaactctcgttaaggaactcggcaaaatgaccccgtaacttcggaagaaggggtgctagccaagagattggttagccgcagtgaataggcccaaacaactgtttatcaaaaacacaggtctctgcaaaatcgtaagatgacgtatagaggctgacacctgcccggtgctggaaggttaagaggagagcttagcgtaagcgaaggtttgaattgaagccccagtaaacggcggccgtaactataacggtcctaaggtagcgaaattccttgtcgggtaagttccgacctgcacgaaaggtgtaatgatttgggcactgtctcaacgagagactcggtgaaattataatacccgtgaagatgcgggttacccgcgacaggacggaaagaccccatggagcttcactgtagcttgatattgagtatcttttaaacatgtacaggataggtaggagccagagaagataggacgctagtcttattggaggcaatgttgggatactacccttgtttgaaggatgctctaacctcgacctgtaagccaggccggggacagtgtcaggtgggcagtttgactggggcggtcgcctcctaaagtgtaacggaggcgctcaaaggttccctcagaatggttggaaatcattcgcagagtgtaaaggtataagggagcttgactgcgagagagacaactcgagcaggtaggaaactaggacttagtgatctggtggtaccgtatggaagggccatcactcaacggataaaagctaccctggggataacaggcttatctcccccaagagttcacatcgacggggaggtttggcacctcgatgtcggctcgtcgcatcctggggctgaagtcggtcccaagggttgggctgttcgcccattaaagcggcacgcgagctgggttcagaacgtcgtgagacagttcggtccctatccgtcgtgggcgtaggaaatttgagaggagctgtccttagtacgagaggaccgggatggacgcaccgctggtgtaccagttgttccgccaggagcatcgctgggtagctatgtgcggaagggataagcgctgaaagcatctaagtgcgaagcccccctcaagatgagatttcctttgcgtaagcagtaagacacctcagagacgatgaggtagataggctgggagtggaagtcctgtgaaggatggagcggaccagtactaatcagtcgaggacttgaccaaagcgaagcaaactggaaggttttttgcgagaaggattatgtttagttttgagtgtaaaagctcaaaagagtacggtggcgaaagcaagaaggatacacctgttcccatgccgaacacagaagttaagcttcttaacgccgaaagtagttggtgggcaactgcctgcgaggaaaggaagctgccgtgctcttttttaatattccggcttagctcagttggtagagcgcttgactgttaatcaagatgtcgtcagttcgagtctgacagccggagtaaaggggagaaggaagcggaagacttcttttttgtgccttttgggtatgttaaaaggctaattaggctaagcaagcatgacttgagggtcaaatttaatataatcattaatagaagacatagtaaaattcctaacaagcttaattgaattgattacggaggctatgctctctttttaagtgcataaaaatcttatagatagatacgcgtggtgctagttaaatcgttctagacaataagccaaattataagctaaaattgcaatttccaaccggctttgaaagcctatcagactacgtgctcgattgttctcggcattgtaataggtcagaagcgaaaagtcgctttcaattgttctgcgaatagccatcaattgatgatcattgtgctttttagctcctgtcatatttttacgatatggtgtccaaagttcgtaacccatttgttttagctgttgatgcagttctttgcctaaatagccttcgtcgccaagaagatagtaattagatggatgggtattttctatcagttcaactgtctccctggcatcatgaactgatgcctttgttacgacataatcaagaatgtaaccgtcatcgctaacaatggcatgaactttgaaaccatagaagtaaattttcttggtggccttataaccaatgttggcataaccgcgaaaaattttagcacgatagtttcgaattggttggcaaacaggtaccggaaagctgtcaatgatcaagaactgtccattcaggtcaacctttttattcatttcttgccgtatctgataaatcaattgcaatagctgacgtgaacgccgattaaaacgtgagtgtgataaacaattgaaacattcacagaatcttctttgtgattcaattcctgtcttagcttgccagataagtaaagccaaaatcagactgtccgtagttttaatttgatcaatatttcgccgatgagtaaactcagccggtgcatacaaacgataccagtgccgacaaattatcactaaatctttaaaactaacttgtaaatggtggctaaaacgcttaagcttaaggcagttcaatcagatcagactcttttctattattactatttacaagtcgagtctaacaagattggacttttttattaactaaaacgatttaactagcaccacgcgtagatagattattataaatacgcgtggtgctagttaaatcgttctaggcaatatgccatattataagctaaaatggctatttctagccgctgctgaaaaccagctaagcaaagaaaagtcgctctcaattgttcttctaattgccatcagttgatgatcgttatgctttttagcgcctttcatgtttcttcgatatggtgtccaaaggacatagcccataccttttaactcggcagttaagtcttttcctaagtagccttcatcgcctaaaagataatggttaattggatgagcattaatcatcaattctgtcgtttctttggcatcatgcactgatgctttagttcaagtacatagccatcatcgcttactagcgcgtgaaccttgaagccgtaataatagatttttttagtggctttctagccgatatcagctatgccacgaaagatcttgacgcgatagttgcggataggctgacaaactgggaaactgtcaataattaagaattctccagctgtttttacttcttgattccaatcttgacggatacagcgcattaaaggcaaaagcattcgtgcccgacgattaaagcgagaatgagacaaaccgacaaagaatttacaaaatcttctttgagattcgataccaatttcagtttgccaaataagcatcgctaagatggagctgtcagaaattttaacctgatcaacatttttacggtgcttcaattcatcaggagcacaaagcttgtacaaagaacgacaaattacatttaaccgagcaaagctaacttgtaaatggtgagaaaaacgattaagcttgagatagttcaattagatcggactcttttctatttaatttaagttacaacttgagtctaatccgattggacttttttattaactagcaccacgcgtttataaatattcaacgacagtaaaattaggtaagcaatctatatctaggaatctgttggggttctgattgtagtaggctaattatacaaaaatgagttaacaaaattctgatcagaattagtacggttaagattgaaaaaatagctggtaattattactgtatctctttgtaattaggtagcaatgctattttttacttctaaaatataattaaaccggtcagacaattcgtattgatctgaatttggataaacagttataacaaaactatgtgtgcaaagcagatgacagggacttttaattgatctcgtatgttggagcgcgctgtgttgactatttgttctaagtgaacagatgataagtatgcctctatctaagtaccaagatctaggaaattcattctgaagtagttaatatgtgtcaatatgtcgcacaaaggtaactatgaattacagcaacataagagaaatttgaaaaatagtttttaaattgtggcttgttattagtgaaaatgataaattaaatattattttggcagaaaatacagcttaataacaaaaaataaaaatattttttgcttacctttaaaaatatagttcgagatttataaagtttttaacgagttaaagtgatatttctataattgaaagcagattctactaatgtaattactataatcagaataaatatttcataaaaatacatagaacccgaacgaagagcaagacttgccaaagcggagaaaataaggtaaattaataaagtcgcttcgagagatgcgacgagagcttaaaaacagacatgcaaggaaagaaaacaaataaaaagaaaaaagtacttgcaaagaagtaaataagctggtaatatatttaaatgtcgtcaggtgaaagcagaaaaagcttgagtaagacgaaaaaacaaatcaaaaaagttcttgacaaagaaatgatggtttgataaaatataaaagctgtctgctttgcaaaaaaagcaagacagaggtagtactttgaaaactgaacaaagtttcgctaaaagtgtgcgggtgtaaaaacccaaacaagaagcgaagtcaattcgcgagcaataaatttgagacaaagatcttaaataaggaatgagcaatcattcaaactttttaaaatgagagtttgatcctggctcaggacgaacgctggcggcgtgcctaatacatgcaagtcgagcgagcggaactaacagatttacctcggtaatgacgttaggaaagcgagcggcggatgggtgagtaacacgtggggaacctgccccatagtctgggataccacttggaaacaggtgctaataccggataagaaagcagatcgcatgatcagcttttaaaaggcggcgtaagctgtcgctatgggatggccccgcggtgcattagctagttggtaaggtaaaggcttaccaaggcgatgatgcatagccgagttgagagactgatcggccacattgggactgagacacggcccaaactcctacgggaggcagcagtagggaatcttccacaatggacgcaagtctgatggagcaacgccgcgtgagtgaagaaggttttcggatcgtaaagctctgttgttggtgaagaaggatagaggtagtaactggcctttatttgacggtaatcaaccagaaagtcacggctaactacgtgccagcagccgcggtaatacgtaggtggcaagcgttgtccggatttattgggcgtaaagcgagcgcaggcggaagaataagtctgatgtgaaagccctcggcttaaccgaggaactgcatcggaaactgtttttcttgagtgcagaagaggagagtggaactccatgtgtagcggtggaatgcgtagatatatggaagaacaccagtggcgaaggcggctctctggtctgcaactgacgctgaggctcgaaagcatgggtagcgaacaggattagataccctggtagtccatgccgtaaacgatgagtgctaagtgttgggaggtttccgcctctcagtgctgcagctaacgcattaagcactccgcctggggagtacgaccgcaaggttgaaactcaaaggaattgacgggggcccgcacaagcggtggagcatgtggtttaattcgaagcaacgcgaagaaccttaccaggtcttgacatctagtgccatttgtagagatacaaagttcccttcggggacgctaagacaggtggtgcatggctgtcgtcagctcgtgtcgtgagatgttgggttaagtcccgcaacgagcgcaacccttgttattagttgccagcattaagttgggcactctaatgagactgccggtgacaaaccggaggaaggtggggatgacgtcaagtcatcatgccccttatgacctgggctacacacgtgctacaatgggcagtacaacgagaagcgagcctgcgaaggcaagcgaatctctgaaagctgttctcagttcggactgcagtctgcaactcgactgcacgaagctggaatcgctagtaatcgcggatcagcacgccgcggtgaatacgttcccgggccttgtacacaccgcccgtcacaccatgggagtctgcaatgcccaaagccggtggcctaaccttcgggaaggagccgtctaaggcagggcagatgactggggtgaagtcgtaacaaggtagccgtaggagaacctgcggctggatcacctcctttctaaggaagcgaaggatatggagagcaggaatgctaagagaagtatccagagcaagcggaagcacactgagaaactttgtttagttttgagggtagtacctcaaagatttgaaaaacgccaagcgttagtcgggcctatagctcagctggtttagagcgcacgcctgataagcgtgaggtcgatggttcaagtccatttaggcccattgacataacgaagaaaaagagttaaagttatgtctggccgaaaataaaatactctgggggcttagctcagttgggagagcacctgctttgcacgcaggaggtcatcggttcgaacccgttagcctccattgatccagaaaaaggatcaaagagctagtacattgaaaactgaatataatccaagcaaaaaaccgagacaatcaaagagaacagattgtagagcgaccgagaagagaattcttgagtaaggtcaagtagaaaagggcgcacggtgaatgcctaggcactaacagccgaagaaggacgtgacgaactacgaaaagcttcggggagcggtaagtacgcagtgatccggagatatccgaatgggggaacccaatgcagagatgcattattgattagtgaatagatagctaatcaaaggaagacgcagtgaactgaaacatctaagtagctgcaggaagagaaagaaagatcgatttccttagtagcggcgagcgaagaggaaagagcccaaaccaagtgatttatcatttggggttgtaggactgcgacgtggcagtgtaagagatagttgaattatctgggaaggtaagccagagagggtgagagccccgtaagcgaaatctcaagcacgcctagcagaatcctgagtaggccgggacacgaggaatcccggttgaaaccgcgaggaccatctcgcaaggctaaatactagttagtgaccgatagtgaaccagtaccgtgagggaaaggtgaaaagaaccccggaaggggagtgaaaaagaacctgaaaccgtgtgtctacaagtagtcaaagcacattaaagtgcaatggcgtgccttttgtagaatgaaccggcgagttacgttatctagcgaggttaagtcagaaaagacggagccggagcgaaagcgagtcttaatagggcgaaaagttaggtgacgtagacccgaaaccaagtgacctacccatgaccaggctgaaggtgtggtaaaacgcactggagggccgaacccacgtaagttaaaaattgcggggatgagttgtgggtagcggtgaaattccaaacgaacttggagatagctggttctctccgaaatagctttagggctagcctcgtggagaggataatggaggtagagctctgtttggactaggggcccgtcaggggttactgaatccagataaactacgaattccagatatccatacacgggagtcagactgcgagtgataagatccgtagtcgaaagggaaacagcccagatcaccagttaaggtccccaaatctatgctaagtggaaaaggatgtggagttgcgtagacaactaggacgttggctcagaagcagccatcattcaaagagtgcgtaatagctcactagtcgagtggcgctgcgccgaaaatttaccggggctaagcatagtaccgaaactgtggatgtgttttaaagagcacgtggtaggagagcgttctaagagcggagaagttgaatcgagaggatcaatggagcgcttagaagtgagaatgccggtatgagtagcgaaagataggtgagaatcctatccgccgaaagactaaggtttcctggggcaggctcgtccgcccagggtaagtcgggacctaaggcaaggccgagaggcgtagtcgatggataacaggtagagattcctgtactgtgtcaaatcgttaagagcgaaggagggacgcaggaggtgaagcacgcatcgcgatggaacgatgttcaagcaacaagtgcggttaagagtcaaatgcttctaaccagcaacacgagttgtgaagaggagtgaattaaaagtagcgaaggtgtggtaatcacactgccaagaaaagcttctagccagagatgacatacccgtaccgcaaaccgacacaggtagtcgagtggagaacactaaggtgagcgagagaactctcgttaaggaactcggcaaaatgaccccgtaacttcggaagaaggggtgctagccaagagattggttagccgcagtgaataggcccaaacaactgtttatcaaaaacacaggtctctgcaaaatcgtaagatgacgtatagaggctgacacctgcccggtgctggaaggttaagaggagagcttagcgtaagcgaaggtttgaattgaagccccagtaaacggcggccgtaactataacggtcctaaggtagcgaaattccttgtcgggtaagttccgacctgcacgaaaggtgtaatgatttgggcactgtctcaacgagagactcggtgaaattataatacccgtgaagatgcgggttacccgcgacaggacggaaagaccccatggagcttcactgtagcttgatattgagtatcttttaaacatgtacaggataggtaggagccagagaagataggacgctagtcttattggaggcaatgttgggatactacccttgtttgaaggatgctctaacctcgacctgtaagccaggccggggacagtgtcaggtgggcagtttgactggggcggtcgcctcctaaagtgtaacggaggcgctcaaaggttccctcagaatggttggaaatcattcgcagagtgtaaaggtataagggagcttgactgcgagagagacaactcgagcaggtaggaaactaggacttagtgatctggtggtaccgtatggaagggccatcactcaacggataaaagctaccctggggataacaggcttatctcccccaagagttcacatcgacggggaggtttggcacctcgatgtcggctcgtcgcatcctggggctgaagtcggtcccaagggttgggctgttcgcccattaaagcggcacgcgagctgggttcagaacgtcgtgagacagttcggtccctatccgtcgtgggcgtaggaaatttgagaggagctgtccttagtacgagaggaccgggatggacgcaccgctggtgtaccagttgttccgccaggagcatcgctgggtagctatgtgcggaagggataagcgctgaaagcatctaagtgcgaagcccccctcaagatgagatttcctttgcgtaagcagtaagacacctcagagacgatgaggtagataggctgggagtggaagtcctgtgaaggatggagcggaccagtactaatcagtcgaggacttgaccaaagcgaagcaaactggaaggttttttgcgagaaggattatgtttagttttgagtgtaaaagctcaaaagagtacggtggcgaaagcaagaaggatacacctgttcccatgccgaacacagaagttaagcttcttaacgccgaaagtagttggtgggcaactgcctgcgaggaaaggaagctgctgtgctcttttttaatattccggcttagctcagttggtagagcgcttgactgttaatcaagatgtcgtcagttcgagtctgacagccggagctagcggaatatgaaagaggcgggggccagaggcttccgcctttttgtgtgctattaaagttctataattaagcttttctaagtcttgaaatttttttaaatagggtttccaaggaactttgaggagtttgtactctgaatggtattgatggatacgttattttttctgccggaaagccacagaatggacaagtgggctgctttaaaagggcttcgtagactttgtattgcactccattgaagaatttatagaaattgttgtaaaaaacgatatttttatctttaatatcgagatcaaatttaatacaatcattaacagaggacatagcacaactcctaaatagcttaattgagacagaatatcataaatattcatcaacaggaaaaattatagagctaataaagaagttatagctttttatttgcgttatgaaatgtataaacttgttgtctttgtctctctattagactggtaaatattcaaaagtatatgttaaatttcagacattaaatacttagaaaaaaggacatatttagatggataaaaattctgatagacttacgttagtgccatatttcccgaatgaaaagcagactcttaaatggtaccaggatcctaaaatctgtaagcaggtagataatattgataccgtttatgatttaactaaattacgtcgaatgtatgaatatttgtcagtgcatgggtggtgctactatattcaatatcaagggaaattgattggtgattgtactttgctaaaagacggtgagatatcaatcgtgatttgcaaagaatatcaaaacttgcatcttggtagaaaatgtgtcgacaaattggtgcagcttgcaagaattcagaaaatgacgcaagtgaaggctcacatatatgactttaatattcaaagcaaaaaaatgtttacaagaatggggtttaaagagcaacaacctgactggtactcttatgatttatagatcaaaaatattcatgttaccaagtaattcatacaaacaatcagttggtgtgatgtcagataagcactcgtattagaaaaatgtaatcatcagtaattaaagactgtagttgaatcaaataattaactcagcgtataaaatgctgagttagacaaaaaaacaacgagcaattctctcgttgttttatggattcattttgatcaaatttttagtttatctttagttgtaaataccaacttgattaatgtgggccaattccagaactggagattgagcgaggtccaaactaacatcacagccagcatggataccattattttcgccattaagccagtgggtattattagttacgtcatagacagtaccattaaatgcaatataagctggacgtccatttttaccattgtaatttgatagagtttctttagtaaattttctcatataagaagctcctttctaataagatcttgatatattaatggtaacactttgtcaccttatagcaagagatacgaaggagtcttatgcttttcttatgaaagatgaccacgccacccagcaatatcccaatctagaaagtcataattaagctttttaccataaattttctcgtaggcagcaactttttgtcggtagtcgagttccatcatcttatgagcgttttcgttggcgtttagagaaacgtcagggaagattggtggtaaaacatggacaatatatttggtctcataaaaattaggatctttcttttcgattttaggtagatccttaatctcgacaaaagtggagactaccggtacattttgtttagccgcaaaataataggcaccacgttgtaatttgcgaggcttgcgataattccaccacatctcctgttctggataaattaaaacccaattatttttagctaaagctgcactgaggtgcttaggaaattcatttccaatatagctaggactctgaactagtggaatagtgccaacataattcattaaatagcggaaaaatcccggtagcattaggttagtatcttcaattacaattgaaagctgatggtgcatcttgttagcgagcagcttcattggtaaagaatcaacctgattgtagtggttagaagttaaaattgcgccaccaataggtaaattatttaggttctctaaacctacaaattcagttgatccagctaatgctctggataaagtaccaaataagagatgtccaatacgattattaagcttacttgaaaaagtgttacgcttattccaataatcattgaccaatttaaggcgctgatctagggacatttggggatcgccgatttctacttttgctgtgaagttacgttcattagcagctttttttatatttttaatcactgcctcacgattatcgccaaaaatcatagtgttactgcctctcgtttcttaacttttgcccaattattaggatcttgctcagttttgtcttccttagcaagcatatgatccaatttttcgcggtctgctgcacgctcgtcatcagtataattattgagttcgttctttaattcatcgaaaaactgcgtttgtttggcactatcccagaagtactgtgcatattggacattagcaaaatgccatggcttaaagaaaagattatagtgaatcagaccaggattagttaaaggttcagtgttttcatttggcatagcatcccagcgaggatttaagtgcaaaattctgccttccccgatttcatttaaatagtcttgatcaggagcaatacaatcaaaatgatacttttctaaaagtgtcataaaatggtcaataaaatgttcagcgcgaaaggccctagcattcatgacgagcatgccagagttaatgtatttcttggggtcaagtgccaggacatttttgatgtattttatcatcttgtctacatattgaattgaggagtcggtgcaagcagcaaataaattatcacccaattcggagttgtatagtttagcaagatcgtcgtttacaattgtgtcgctatcaatatagatcaccttatcatattcgggaaaaagttctggaataaagaggcgataaaaaatcgacatggtaaaaaagtcagcgcgaagaaagttttccttacgattttgaataggttgtacaagttgatcatcaatatggaaaaacttcacatgaacgtttgaactgctaagatcagacaaagctttttgatgctttgatgagagatcttgatttaaaaagtaaacagtataatccttatttggatctgtatgtttgactaaagaattaagagaaacagcagcgtatttggtaaagtcatcgctgatactgtaaaaaataggaattgtcataaaattacctttcttagattttaactgattccgtttgtttaaccttagcccaggtatttggctctttgacaatcatgtcaacttttttggccatccattctaggttagctcgggccttttgacggtcttcatcagtaaagttgtctaattgctgctttagttcatcgtaatacggcgtagttttagcaacataccagaaataatgaccatattgaacatcagcaaaatgccatggtttgaagaaaagattgtagtgcacgatcttaggatcttgaatttcaggaatgctttcatttggcatagcatcccattctttaggtaggtgataaatcttatcttcgcaaatttcattcatgtaggcttgatcagggtcaacgttatcgaaatgatatttattcattaagtaatagaatttatcaacaaactttttgtctctaaaggccttcatattaaacagaattacaccattattgatgtatttttctgcaggaaaaattccctgacattctttaatgtacttttgtaaaagtggcatgtaacgaattgataagtcgggacatgaagcaaacatgttgtcggcgatatcaatttcatacattttagcaatatcagtacagataatagtatctgcatcaagataaactgccttgtcatattgagggaacaattctggaatgaatagtcggtaaaaaattgacatagtaaagaattgagcacgcaagtagttttccttagtattgtgaattggcttaaccatgtcatcgtcaatatgaaagatttgaacatgaatattatcagttgaaagatcttctaagctctttttgtgctcatcagatatctgttggactaaaagggtaatcgtatagtccttcttggggtcagtatggtcaattaatgatttaattgaaacatatgcatatggcgtataattatcgctaattgtgtaaaaaacaggaatggttttcaaaataagatcctcctaaattatttttttaaattatttcgtaatttgagatattcgttaagcaaatcatcatattcatgtaaatgaagtacactgtgtacgcgatcaacatcccatggcttaactgtttgagtatggaaataaggccaaaacctaaagctagtagtgaaatgttgaattttggtgtttttttgcaaatgatattgctcattataacggcgtggtgctactcgcttggctacagctagcttgtttattgctgattggtcgggcaaaaacatttgcttaacctgcatcatatgccgcacctcggcaaagagatcagtttgcttaattttcttcatattcagcaacaaaacgccagaattaagataatcaaatgcgcgcttggtcttaagattgtggaagaagaagcggccccaataatcaagtacgcccactaattcgattccggtaatatcctcattgtaaaaagttgtaatatcaccgcgaatgacaatgtcatcgtctaaataaagaatgcgatcaggaatctgtggcaattggtctgcaaataaacgcaacatagcatatggcgtgaagcgagtattcatgttagcggttggcggttcctgttcaaataacttggtgcagtcaattaattcaactgtactgttaggattggctttttttactaaagaacgtaaaaaatcagccgcatgttgtgagaaagggtgatatttacgttcatcactgtgtgcctccatcgttaaaatataaagatgcaattcttgagcaccagaatttttgattaaagataaggtggaaatcaaaacgccatcttgagcattttcatctccacaaaaaagaatattcatgataaactcctattttttatttcttttgaatatattgacaatattcataatcgctattttttgcacgctgcttcattacctgccaaatttcatcgtgaagcttattttgagcttccttacggcttaaatttgtatccgggtaaaagggcccatcaatgtaaataacggcactaggccgcttgctaagccactttttatggtaggttttggtcatgacgaaactaggcgcatttaatttaactggaaagtgcatgcttgttgcatcgaacgggcgaatcttcgtgtaatagggccagacatgagcttcagggtagatgagaatctcgccctttttatccttaatcacagtttgaatggctttaattagtttgagcgattgcttcatatttttgccaacaggcagaccgccgtagcgtacaagatatttgccaatgaaggggatgccccagttagcttgattagcaatagcataaaaatttttgattggaaaaattgtgagcgaggtaaagacatcccccatgggtctagtatggttgccataaataaaatagcccccattgacttgcttaagtttttcttgaccaacgacttttacatgatcgaagaagcggaaaaccacccaaccaaaagcgcatgctaagtgacaagcggtagtggaccagattctagctccaagagaattaggtagaataacgtaattatcgggtagactgaaattttgatcgtgactatcgactacatcatcggttgttttttggtaataataaatccgtttcatcttgccctccatgatacttatgtatcctatgataccatggaaaaaagcctaattcctaagacgagaggaatgctgaaagaaaataaaaaagattcgtaatttcatgatcgaaaaatacgaatcctctgtaaaatagcataaaaaaagcaccgccttcttgcagtgcatctttcatattatgggtggccaggggatcgaaccctggacccacggattaagagtccgttgctctgccagctgagctagccacccatatttgttcatcagctcccgccgacatttaaatatattaccagtagttttataatttgacaagctttttttgaaaaaagttgaaaaataatttgaagctagcaaaaagcgcccataatggccgcttttttactaaagtttatcttgaatatgataggctgtgccttgctgatcctgcttcatgtgatctgcatagtaaacagcatagacaccgctttgatcatttttggcaatcacaatttggcgccctgttggacgttctgccttaatgatttgagcactgcggcgtgcttctttaaagtcgtgtgaagatgcgatggcatcccctggattaaaaaatacagcttcgttcattgtaaagccccctcgtacaaattctaattttattttaccaataaagccctttctaaatccaatttaagaaacaaaaaagagataagatcaacatcttatctcttacgaaaaatattatgggtggccaggggatcgaaccctggacccacggattaagagtccgttgctctgccagctgagctagccacccatgtcgttgaatcaatcaacagatattattatgctattgttgataagaaaatgcaagctttttttgaaaaaaaacaaaaatttttggctaatgttacaaaattcagtataatgtaagggcaaaggaggcattcccgatgccaaagaagattctcgtcgtcgacgatgaaaagccgatttctgatattatcaaatttaatttaactaaggaaggctttgatgtcgacaccgcctatgatggcgaagaagctgttaaaaaagttgacgaatacgacccggatctaatgattctggatttgatgttgcccaaaaaagatgggttggaagttgcgcgtgaagttcgtcaaacgcatgacatgccaattatcatggtaactgctaaagatactgaaattgataaagtcttaggactggaaatgggtgcagatgactacgtaaccaagccgttttctaaccgggaattagttgcccgtgtgaaggctaacctgcgtcgtcgtgatattgttaaaaaagcagaagctgccagccaagaagagaccgataagaatattaagatcggtaacttggtcattatgccagatgcctatattgtagaaaaaaatggtaagaagattgaacttactcaccgtgaatttgaacttctttactatttagctcaacatatgggacaagttatgactcgtgaacacctgcttcagactgtttggggttatgactacttcggtgatgtgcggactgtagacgtaacggtgcaccgtttaagagaaaagattgaagataatccaatccaacctcaaattttagttacccgtcgtggtgttggctattatgtaaaacagccgagtgaagaataataaagaaagccacagaactgttatggcaatgtcattaagttaagacattgacaattaatattagacttttaaagcactgatttaacatttaattggttaaattggtgcttttttcgtacaacaaataaggcatagcacagattctgcttttttaagctacgcgatataaataatatacagctgatttgggcttaatatttctcttgtccttgcggcctggtctaattggaatggtataatagctgatctgaataaggatccgttcaaaatcttgcgttaaagaagaagccaaatacatgctctgaataatcaagcatgattgcttgaaattgatggcatattgatacttgcaatgcttttgcggaatataggcctgtgcatcaatttgactgattgcattaaacataatcatatgggcataaatttccatttcaataaatttatcttgtttggaatggaactgtacactgcctaaagaatacttcaatttcttgaaggaggtctcaataccccaacgcagatgataaagctctttaattctttttagcggataattttttcgatcaagattggttagcacaacttcccattcttctttgcctgatttggcatcattaattctaaatttgcaggctcgaaattttattgtgcataactcgccaaaatcccagcttagatcctgggtatttttagagcgatacttaatatattggcgataatgatgctggacatggtgaatattctcactggctttatgcgtgatgtagtaatagttagaagtagttaccaggcaggaaatctcacgatcacattcttgatcaggcaatgtcgttatttctttaactccgccttgtccagccttagttcgtattatgtaatgacagttaggcaggcgattgcagttttcaatcatattgaaactagtgtagccacgatccattgttacaatatatggaccacaattcaaagctttaagcatttgaacagccgctttgcgttcatccatttctgatttaggctgaaaaatacaatcctggtaggtattattcaatagatcatataaggcattaacgtgaatttgacaatagggtttctttttatgagaagaagcttgtacaatgttattcgatttcggattccagatttgattaaagtcagagccatcaatggcaaacaaacggtagtgatgatcaaaaagttgaatattaaatagattttgattaaaaacagtcagaatatgtttaaaacaagcaggagaaagctggcttttgcgttgaacataggcagaagtactaactactttatcgttctttttagttgcatcttcgccaaaagctctaaagagttcactgtttaaattctgaccttgcatgttaattgtagttttaaggactgtcgctgcatctaaagtgcgtttcctggtaaaagcatgaggattattaataaaatcgtgaatatgatccccagtattattgataatttgatcaagacgttctagaatattcttatgaagggctttcataattaacaccatctttctggcaataattttgaaggtttaaaatatataatatataagataggcgaaaaggctggtcttttcgcctttattttatacaaaaaaagagatcgaatccaaatgattcgatctctaaaaaagcacccttaattgtcaatgtcttaacttaatgacattgactgttatggtagtggctttcttttttatattttttagatattgaatgagtagaatgaaaaaattcaaagcaagattaaatagtacatttaattccattaatactaaaattgcaattgtgttcatgctgatgctactggcaacaattgaagttattggagcttattttacccgtcaattagagcaaaatagcattgaaaatttccaatcatcaatccagattcagactatcgtcagcaatcagttagctaatcagttgaccagtgataataaaaatactaatgatcgcttgaatcaaattgttaatgactacaataatgatgcaattagtgaaattattgttgtcgataataaggatacgattcgtgccgtttctaacttaaatgataaaagtaagatcggtcaacggattaacaatactgatgtgaagcaggttatttcaactggacatcaaattaataaagtggtcgatgatcatggcaattacatgattcaaatatcgccgttgactagtggcaatggctctaacaatactgttggtgctgtctatgttaaagctagtatgcaagatgtctttaacaatttgcgccaaatttcattgactttcttgattgcgtcattgatcgcggctttattaggtgcatttttgtcattagttatttcccgggcaattacgcaaccgatcgaagaaatgcagaaacaagcattgcatattgctgatggtgattattcaagtcaggtaaaaatttattccaatgatgaactagggcaattagctaaagcatttaataccctgtccgtacgaattgaacgctcacaagaagagtctgatagtgaacggcggcgactagatagtgttctgtcacacatgagcgatggagttctagccactgatcgtcatggtaacgtcagtgtggttaatcatatggcactaaactttttaaataaaaaagaagacgaggttatcaataagccgattgctgaagtactgggactagaagatacttcgtcacaagatttgatttctagtcaaaaagagatcgttattacccttgatccaggtacgcgggatgaaattattttgcatgctagtttttctttgattaagcgggtaactggctttgtatcagggtcagtttgtgtattacacgatgtaactgagcaacaaaagaatgaagattcacaaagacagtttgtttctaatgtctcacacgaattgagaacacctttaacaagtttgcaggcttatattgaagctcttaatgagggtgcttggaagaatccagagattgctcctaagtttttggaagttacccaacaagaaactagtcggatgattagaatgatcaatgacttgttgagtttgtctagaatggaccgtggcgtttcaaaaatggatctagaatttgttaacttaaacgattttgttaaccatattcttaaccgtttcgatatgattgttaaaacagataaaaataaagaaaagaagaaatacacaattaagcgtgaattaggcagtcaagccttatgggtggaaatcgataccgataagatgatgcaggtaattgataacattatgaacaatgcaattaagtattcacctgatggcggtgtaattactgttagaatgacccaaaaccaaaatcatgttatcttaagtatttctgaccagggcttgggtattccaagaaaagatctgggtaaaatctttgaccgcttttaccgagttgataaggcacgttcccgggcccaaggtggtaccggcttgggcttggccattgctaaagaaattgtggaagctcaccatggtaaaatttgggctgacagtagcgaaggcaaggggtctactttctatatttccttgccatatgaaccgatgacagaggaggatgattgggatgaagtttaaattcaaattcggtgaatttttcttaggcttagctacactgatcgtcattgtcctctcaattgtgctttggatctttattatgactagtgatcagcgctttagtaatattggtcagcaaaatcaaaataatatcactaaagagcaaacgcgtagtcacaattttaagtcattatatgatttatatattccaactacttcatatggttttgctaatggaaatttgtgtcagctatatgattcaaaaaataatttgactttagaatttaccaaagagataaaaaaagccaaggccactaataaaattaagaaaatagttgatactagaactaaatatgaagagtatttaaacaatcccaactatgtgcagttggtttatccagatgaaattactttctccttatttaaccagttgaataatgccgcaaatgataaccgcgagtttaaccgcttctttatctcgcagtcaaatcactggatttatttgggaaatgatcagactaatgaaatttatcaagtaaaaattgctggcgcaaattttgataaactacgtaaatatgcatgtaatgctaagagcaagtatccagttagattagttcgtttaaaggaaggctattcaccgttttacatcaagacaatgaatgctaaagtttatagttacttgactaatcatcaatcgtattcttactttgtttcgcgtttattaggtacatctggcgttactagtaagactaataagaatggtcaaacggtatattctttgaactactatactcgcttaagagtgccagattctaattcaggtgagcataattatctttatactcattatgaaaaaaataagatccccaatactactaaccgcttattagatagcgtttattatgttcaccaattgggtttaaccgagcaagatttacgcttctttgatgcagatggtgctaatgttagttatctaaactatattgaagggattcctgttttcttaaataagcatgatttgcaagtcaagacgaccttttcaacagattcgattaatgtggcctttaatagtgtaaacttccaaattccaattccgtttgatggtcaaactaagcggttaaaaccaacccaagatgttgttgatgaattagtcaatcacggcctaaagcaggaagatattcaacgaattatcgttggttttgctgaagaaaaggattcaagtcaccatagtttgattaacttgatcccaacgtactatatcaaagcctacgatgaatggaagagcctaggtgaatgggaaaagcaagacgtatctacctaccgtgaagctgatcagttaactgttaacgaagggggaaaatagaaatggaccataaacgaatcgaatggctatttttcgttgttttctttttaattgatatttatcttggaatcgaaattctccgttctcccgttaatttaagtaacgctgataccactactcgtagtgttgctagcatccgcaatgaaatgaagtcagacaatattgatttgcccgataagatttcggatgcaccagattctggttattatttagctaccaagaatcgtgactatctctctggcaaagttagctcgctgactaatgtaaatgcccgctattctaaaagcgataatgtgctttatggtgaaccaagacaagcagtccttttgagtaaaaaacctaaggaagctttagaacaaattgaagattttaagaatgattcgaaaaatattccttatggtaaagaattcaagtatgaacctgatatgtcgagtgaagacaattatgtttttgtgcaaaactcagattatggtgaaatttatgctaactcggcccaattgaatatcaatgtaaaagataatcagattattaattttactgaaacatatatggggcaagctagtccagtgcgtgaattacagtcaaccatcagtgcttggcgtgctgtgcgtgcgatgtacactgatcgtgagttgactaataattcgcgcgtaacgcaggtaaaattaggttactccaaactgacagaagtacgtggcagcacaatcttgttgccaacttggctggtttgggtagaaaataagacaactaaaaatatcacgatgaaacgtattaatgcatatacggcacagatgctacaatcgagtacctataatgtagaaaagtagaagggacaaaaattgaaggtttccgttttagcaagcggctcgaccggcaataccagtttaatcgttacaggccagcataaaatcctgatggatgctggcatttctggtaagaaaactaaagatttgctagccgaagttggagttgatattaacgagattgatatggcctttttaagtcatgatcataccgatcatagtggcggactcggcgtgttgatgcgccgttatcctaagatagatgcttttgccaatagtgggacttggcagtatttattggatacgaaaaaaataggtaaattaccggctgaacaaatgaatacaattgaaccaggccaaactaaaacttttggtgatgttgatattactgcctttgcaactagtcatgacgcagctgagccgcaatattatgtgtttactagtggtggtaagcgggtcgcttttttaactgatacaggttatgtatcagaagaagttgaagggacaattgaagatgctgatgcctatatgatggaatttaattatgataatatgatgctcagagatggaccatattcctgggcactgaagcagcgaattttgtcggatgtaggccatttatctaatgacgaagcagcccaggcattagttgatgtagtcacacctaaaacaaagcatatctttttagcgcatcgcagccaacataataatacggagtatttagctcacgaaacggcaaaggaaatgctgcttgagggggatgcgaatttggatgatgatgttaagattattgatacagaacctaatcagcctacaaaattagttgaaatttagcagttttcacaacattttttcatataatattcaaatttaatcggtatgattagtaaacaagatgaggggagaagcaagcatggtagaaaatcaaaataataataacaatttacaacaacctagaaaaaagaatactaatggtaaaatcattgccactgcagcgattgtcggtgtagttggtggcttgatcggtggaggcgtttcatattacgcagctgatcaaatgaataatgcatcagttaataatggtgccgctcaaactagtgtatcttcaagtagtagtaaagtttcagaaaagagtgctaagactagtggcacaatgactactgcatataatgatgtaaaaggagcggttgtttcagttattaacttaaaacgccaatcaagttctaatagtactaattcactttataatagtttattcggtaatgatgacagtgatgatagctattcatcaagcagcaagggcaagcttgagacttacagtgaaggctcaggtgtagtctacatgaaatctaatggcaagggctatatcgttactaacaaccacgttatctcaggcagtgatgctgttcaggtaatgctagctaatggcaagacagtaaatgctaaagttgttggtaaggatagtacaactgacttagctgtgctttcaattgatgctaagtatgtgactaagacggccgaatttggcgattctaagagcttacaagctggtcaaactgtcattgccgttggttcaccattaggtagtgaatatgcttctacggtaacgcaagggattatttcagcaccggctagaaccatttctacttcatcaggcaatcaacaaacggttattcaaactgatgccgcaattaacccaggtaactcaggtggtgccttggttaactcagctggtcaagtgatcgggattaactcaatgaagttagcccaatcaagtgatggtacttctgtcgaaggaatgggctttgcaattccatcaaacgaagtagttacgattgttaacgaattagttaagaagggtaagattacccgtccacaacttggcgtaagggtaatcgcacttcaaggtattccagaaggctacagaagccgcttgaagataaattctactttgaagagtggtatttacattgcctcagtaaacaagaatagttcagctgctaatgccggaatgaagagcggcgacgttattaccaaggttgacggcaagaagattgatgatgtggcatcgttacacagcattttatacagccataaagtcggtgataccgtaaatgttaccgtgaacagaaatggtaaggatgtcaacttaaaggtaaaacttgagggtaactaaaaatcaaaatagaagttaattaaaagaaaaaaggctatatcacgcggtttaaacgtagatatagcctttttgttaactttttaaatgtgtaacatcaaattgttcggaattatttgttgtcaaacagacaccagcctgttgataagtgtggacaactctgtggattgtgtataacttgataaatataggtttattaacttgtggaaaaatatgatgattttgaccttatttagtgaattctatttgagaaaacaggcgttcatgcaggtataacaagccttaagagataaagtttgtgaaaaaaggctttcataaaatcgatgtgaataaagaaattttagaaaaattattaaatacaacttctggggtataagtaaaataataccacaaaatgttgaaattggtctttgaagttttgtggaaaagtttgggtaaatagtgtggaagggatgttagtattgtgctggtagattaaaattatgaatggaaaattagctatgcttgttataatagaagcatgaatatcaaaattgtatgtgttggaaaattaaaagagaagtattttagggatgcaattgcggagtatgagaaacgactcagtcgttttgcaaaggtgtccattgtacaggtgcctgatgaaaaagcaccggaaaaattcagtgcagctgaagatgagaaggttaaagagattgaaggtcagcgaatcctgagcaaaattaaagataaggagtacgtgtatgtgactgcaattaaaggaaagcagcgcagcagcgaagagttcgctaaagagattcaggatctcgcaacttatggtcattcagacattacgtttgtcattggtggcagtttagggactagcgatgctgtaaacaagaggggaaatgacttgattagttttggtaaattgacgatgccacaccagttgatgcgcgtggtgttgattgaacaaatctatcgtgcatttatgattaactcaggtagtccttatcataagtagaatatagaaaaagcccataaattgggctttttatttttgcatatttgcagatttcacaagcatattgaaaaaaactgtggcaggtcagtgcttttttagttttttatgatttaaaaatagattttgttaaattatgtttggcaacaaaaaagacgatctttcgatcgccctgataatttttgagctaccagctagtagctcacgcacacgctgaagtgtactttatctttgtagtatctcaattttaacacataaatggtaaaattaaaactgcacgttgaaggggtagcgcccttactcgtgtggaaggaggtagactcccatgaagtattactttatctttgtagtagtatttctaccactgaatcgtgatggcaagtgcttcaagaagctcaagaaggctattaaaaagttcctcaagaacctgattgatagtttctttgattaatccgatccagactcaatacagccgtccttcggggcggctttttttatgatgaaaatggcaagtcattgggtgaaaagtattacgcatatcgtgcagtaactgtaaatcaaagtcccataacaattaatggcgctaaattctacaagttggctgatagggatgcttatattaaggtgaccaatattagtggtcaaggtcgcgttttaaagcgtaacgcctacatctacagtacatcaaaaaaacgcactacgcataacggtgcttggaagttgtacaaaggctccacagtgacaacttacggtggttcatacaagtttaagaatggcaaacgctattacagaattggcggacctgctaagcaatatgtaagaacatcaaactttaattagaagttgaatatcatttacgacagcaacataatagttgctgtttttttgcctcaaaaaccatagaaaatcttctgtaatcaaggtaaaatgaaattgattttacaaatatcatggaggatgttggaatgagaaaacgatggacagcagctgttattgctgctttagttgccgtaagtactgccgcaactactgttaaggctgacgatactaacacaacagctaatactaatgagacgcaagtaactgcaactagtgaccaaactaattctgattcagataaggttacttataacaaggcagattatttgtctgctaaccctaaattagtgcgaattaagcatgcaactactgcttataaggatgctgcattgactaaatcagcacagagcgtaaaagcaggatcacactttttaattagtcgaattgttaaatctgacaaccaagtaccaatactaaagactagtgatggcttgtatttgcctgctaaaaaatctttggtaactaaggtcatagcctaccaaaatcctaagggttatcatcaagtacattacacacaagttaaaccatacggtaaggtgggttataacttgtaccgtggctatgagggtattaagacttggaaagtaatgcatagagttggtacttgggcaggtacgaattactataaccaagctacttataacgcagtaaagaacttccaacgtagtcaccacttgccagcaactggtaatgttaacttagctacttgggaaaagatgggcttttctaagaagtcatggtatagcattgatagttatgttgccccacttaaggcttatgcttggcaagggcgtaaagctcatattgaagcaatgattaatcaagcttacaaatatatgggaaaaccatggttagcaggttgttcaactagtccaagctacggtgttgattgttctggtttggtaatgcaaggtctttatgcaggtggcattagtccagttccaactagttcaatcggccacgctcatccaggcaatgaatggaattcacgtaatctttgggctgacaagcacctaaagcgtgttccatattcacaaagacaacgtggagacttagtgttctattaccaaccaggtacgcacactatttggcatgttgcgatttacttaggcaataaccgagtaattgaaagctggccaccacgtgtgatggttcaaccaattgttaattcacaaagaaatgtaattgctggtattaagcgaccatttatttaaggaaaaatatgaaaaaatacttagctattttattagtcagcctgggctttagttcattattgttaactcgccaaacagtacatgccgctgataatgatgatgccgcggcaactaatcaatcggctcctaagtatactggccttaaaaaagttggtaaacattatgtctattttgatcaagcaggcaagcaacgttttaagaataccaagactaaaaaagcatattattggattaataaaagcggcaagatagttggtattaataactacgccaaggtaattagccaactacctgaaatgccaactggttgtgaaattactgccgtgacaatgatgattaattttgctggtaaaaaggtaactaaacagcaggcggccaagattatgccgcgcagctctaaccctaacaagggctttatcggttcgccttacaagaaatatccgctcggctattgggttgctcctaatggggtgaaaccagtagtgaagcattatctcggtaaagcccagaatatgactaattgtggtttgcccgcaattaaggataagctgattaattcacacttggtggttgtttgggtagggatgtttgacggcctctctaaccatgctattaccttgacgggttaccatggtaaaacgatctattataatgatccttggactggaaccaagcggaaaatcaagcaggaaatttttgcaacgcattgggctttagatgttcatcgggcgttgagttattaattttatgtaaatatatttactttttagtcatgttgatcaagccactttcgcagcatttcaacatattcatctgttttttctacaaaagacatgtgaccgcagttttcaaatagctgccatttactgccagcaagctgatcctgcatcgttttagctacataaggtgtacataaatcatcagtcccactcgtaattagagttgggatttttattttgcctagtttttctgtgtattcgtaatcgtgcaagttgccctctggcgtatattcatttggtccccaggcggtttcataagctacaataccaccacatttttttcgcataacgcattcaggccacgttttcgtcatgtcaattgcatgttgattcatgaagtgctcattagcttttaagtaatcaggatcgttaaaattgctagtcaattcggcgcgatgaattgccgcctgttcttcaattggcaagtatttaatcatccggtgtaattctttgctccataaggaagcagacgacaaggttgaagacaagatcaagctttgaatgccaacaggatgataatcacacatgtagattagtgctagcatcccgccccaactttgtcctaataaatgtattttgcgcaaagccaagtgctcccgcaacgccatgagttccttaacccatgtttctttagtataaagttcagggtgatcatcagggatgctactcttgccgcagcctaactggtcgtacatgataatccgtcggttatcaatttcggctaatttgtccaaaacctcaaaataattatgacttgagccgggaccaccatgtagcaatacgagtggtgtcttttcgcttcttcgaccaacaatacgatagtaagtttcatagcccatgaaaggcatttttccttcgataatttccattttttcacctatttgaacaaaaacaatgagatattaaccaaaattagcagggtaaagaagattacccaatctctagctggtaaaggaatagcgatgatcgtcgaccttctttgcccttcgacatagccatgtgattccattccttgggccagattgtcagctgaatttaaagcaacaagaattgctttaaaatagaggaccggcgaccaaaaactgagataaatgccccgcatcatagcgctagttcggatctgtttaaccgccatcttcatctgcggaataatgttaatcgccgccagcacgccgtaggcaaatttactgggtaagtgcaggttctgctctaatgatcgggcaaagtctgtagcggtgttattacgtgtcacgcaggcaatcgtcaaggtataaacatagatacgcgttgacaaattccaagcataataagcatttggtgttggtgaaaaccaaaagagcgttgcaaagattgtaaaagcagcaataaagggcaagataatgagcaagattaactctttgattttgaatcgagtaataattaaataaactagcgcgaaggtgattactaacaaattagtaactaagctagcttttaaagatatttccagggaaataataaatgctaaaagaaattttaaactaggattcataagcttatctttctacatattttaagcgctgatccgcaaaaatcaggtggtaatcgcaaaattcagctagctcgtctatctgatggctaatgataaaaaacgtctggtggagcttttgctggctttctcgcattaattctaaaacgagtttgaccgagttatggtcaagtccactgagcggttcatcaattaataaaacctgatgcttagtcattagcattaatagaatctgtaatttcttctgttggccacctgagagagaataaacaacttggtctaagtgtttggctaaacccaatttatctagccattcattgaccttttcttcagtaaaaaataaatttctatcctttttacttaattctagttcatctttgacagtcacagctaaaaattggtcgcttgctttttgaaaaatttgagctacttgtgttaaatattttctagctgagatttgagcgatttccttatttaaataagcaaaattaccagtatacggaatcattttggtcattactttaaataaagacgtcttgccaacaccattagcaccagtaattagggtagtgccagaatgcaaatttagctcattttgcttaagcaaaagcttgttttgtctaatttggacttgttttaaagtgaaaataggctcactattaggtaagacaaaatgataatgtcgctcatgcaattttttattttgttcaaataaggctatttttttgctagcatttaattcaataacttcttgattatttgtaaactcaaaaagatggtcgcagacaggttcataatcgtctaaaacgtggtcacttaaaataatagtttttccgttgtgagctaaaatcgctaattttttaatcaaaaaagcacgtgtcttaggatcacaactggcaaacggttcatctaagagcaataaatctacatccatagctattaagacagctaaagcaactctttgttgctgaccgcctgatagagtattaatcttttgatcgagaaggtctgcaatttgggtgaaagctgttgcctgatctagtcgtgtttgatactcaccttcatctaactgtaaattttctaaagcaaagacaatttcttcacgtggagttggcattgtaaactgttcagccgcattttggaacatcattgccgccttttgtccgtgcaggtccaccatacctgttagtcgccctgcatatttgggatacaaaccagcgataattttgagtaaggtagatttaccgcagccggtcggtccaattaacagagaaaaaccatggggaatttcaatatttagatgattgataataggttctttttcataagaaaaagtaagattgttaacggttactttcataagcttgattgtacaagatgctttggggactgtctacaggtagagtttgttataagtagaacaaatcataaataatacttaatactaaataaagttttgatttataatgtaattatagtgttaccatattttatttaatttaaggaaggtggacatatggcagctgttgctttggaccaatatctggcaagtgtattaaagtcaaattcaacagataagaatgaaataaagttggaagctggtaatccagattttgatctgtttactatctaccttgaaaatcataatactggtattcatcgctatcggatggatgtttcaacgattttatatattgctaagggtactgtgacaattaagagtggtgaaaagatcattcaaatgaagtctgggaatgttttgctactgactgaaggttgcaagtatgagattttaagtcaaaaacctgatacggtactgataaagttgaagtttaagcgtggatttctatatcgcaagtattttaaagattttagctgtaagggagaacgtgaggttaaagttattgagcaaatcgttgatagcttagaaaatgaacatgttctttggctaaaaaataatcaaattactcgtgcttctcaagtgatgcaacatattattggcggttatttgaataatgatttgtttactaaagctttaattcaggctgagttgaccactatgttgattatttcaattagaactcagcgcatggcaacaccgactagtttggataaaactaagtttgaaaagaagaccttagataattacatcgatcttcattttgccgatgtctctttatctgacgctgcaaaatactttggcttcaatcctaattatttctctaatatggttaaggctaagactggcaagagttttgtggatcacgtggatgatcgaagaatgcaagaagcgcgtgaattgctggctcagcctgatatttcacttagagagattattggtcgagtcggatattcgagtaagtctttcttttataagaaatttaatcaatactaccacataacaccagcagcgatgcgggcagaattgtttagacaagcaaatatcaatttaaagtaaaaaaataatctggacgaaagttccagattattttttacatattttctaagcgtttaatgcggtctgctgttggtgggtgagtatcaaacaagtgcgtcaaaccgtgattgtggaatggattttcaatatataatccagcactactactatcagctactttcattggttggctattttcaatcttgcgtaaggcagaaattaagccttgcggattacgtgttaatttaactgaagatgcatcagctaggtattcacggttacgcgataaagccatttgggctagggatgcagaaagtgggcctaagatcaacacaaagaccaaggcaaccactttaaaaattatggctaaagcattactgtcacggtcatcgtcgtcatcactgcgcacgccgccccagaaccaaaaattggacgccatattagagataaaagaaatgaccccaactaataccacggcaattgttgaaagtaaaatatcgtagtttttcacgtgtgataattcatgccctaagacgccttcgagttcttcacgatcaagtaattctaaaattccttgagtaactgccaccgcactatgttcagggtcccgaccagttgcaaaagcattgggactaggatcaggaataatatagacccgtggcattggaacctgtgccaccatcgccatatcttctacgatatgccacagttccggattgtcggcttcatgaatttcttgcgcgtgattcaagctcataatcatgttggctggattttgccacatgatgaataagtagactaaactaccgatcaaagcaatagtaacgcccattgttggactattgctccaaagataaccgattcccgcaccaactaagcctaagatcaccaaaaagatgaacataattaacgccgttttgcgtttattacgagcaatttgttggtaaagcatggttaaacttccttaaaattaaaacttaacttgaggcacattcttttcttcactaggagtttctaagtagttaatcttagtaaagtggtgccacttggcaacaatatttgatgggaaagtaagcaacttttgatcatatgttgctacagttgaattataaagttgacgagagtaagcgatcttgttttcagtgttagtcaattcttcttgcaattttaagaagttttgattagctttcaagtctgggtaggcttcagccaaagcaaaaattgacttcagagaatcagtaatttggttagaaagcttcatcgcttcttcatggttaccttgaggcacattaaccaattgattacgtaatttgactacttcctcaaaagttgatttttcatgcttggcatagcctttggtggtttcaaccaagttgggaattaagtcattccggcgcttaagttgaacgtcaatttgactccaagcttcttcagcatagactttcgctctttgtaaaccgttgtaagttactatgtagatagccacgattaaaacaataatagctaaaatgatccaaattaaaggtgacatagtttttcctccataaaatatttatttaattttatcgttttcgaatttcttgagcaataaaaaagaatgtcaaagcggcattcttaacaaaaaatattaaattctgaagattaatagtaataatccaactgcagttaaaataatcaaaccagcaaattgcataatagtccattgaataaaaaactttttcttacttacgctaccgtgttggttgaaagtcttaagaactaacatattagccattgaaccgatagcggaaccaaaaccaccaatgtttgaacccaagaataatgcttgagcataagtggtaaatttaccaactaaaatggttgatggtacattgctcattacctgactagagataattgaagcaaagtaagttgaaatttcagaataaacggtgccatgaattagatttacgataagagggatttgttggatatcgctgatgaagatgaagaagccggtaaaggtaagaagtaaggcatagtcgattttgagcataatcctaggattaattgcaagggctaatgcaaccgacgttagcatttgccaaataatatcaatggttctgaaaacaccaaagaagaagaaaataaagacagcagtagttatcagcgtcgggcgccagctgatcttgattggctcagctttttgcaccggaatttcttctttaggaataaacagaaagactaatcccatgattagcattgaaactactagataaggtacagaccattcgaaaaattttaatgggctgacatcaaagcggctgactgagaaaatattgtgggggttgccccaaggcataaatgctgccccaatatttgcgcccatcccaatcaaggtaacaggcaaaatctgtggcaatttataacgcttagcaatatttaaatacagtgggatcaaggtcaatgcagtaatgtcattacctaaaaacatccccgaaatgacagccaacaacgaaaacagcgtgttcaacttacgcgtattatcggcaatacttgtaagcttgtacgctaaaacatccagaacatgcaagtatgcatagatctggataatcgttaacatcgcggcaacagaccataatgtatggaagttaatgtccgcaaaccgcggtctggcaaaaaaaagactgactactgtaatgatcacagtaatctgtaaaattctatctttagcaatattctttaagacggtcataaaaggtcccccttacgtattacaatcgtctaaaaaccctatgtaccattttgagcctttttgttattgcatgcaatgataaatttaaaaaaatatcaagattagcggtatttttgagcatatttttagttagttggaactagtcgtgctatacttaaataagtaagttaataaaatttagattgaaacgaggaaacaaaatgacagagaatgcaatttcaatcaatattaaaccagatgctgcagaaatgattaaaagcaagatggatgcagatcaccaaattgttatcttggctttagatgatggttcaaccaagtattctaaaaaaggcggcacttgtactattggcgacagcttccagtttgtaatccttgctgaaaaagatcctaagtataatatttcaatcgaaaataatgctggtcttgacttgtatactgctcagccggaaacaactttctttgaaccaggtctagtggtaaatgcacgcaactcaactttgagtttatcttcagacagcggcattattgatggtgggatgaccgttacccaatatgaacctgaagcaattactgctgatgatctaaaaaacggcggtcaatgttaaaaaaataaaattaatcatagggacgagggaatgacctcgtccttttttagtatagaattaagaaagtgatttcaatgtaaggggggaagaacaatgacttttgtcaaagaaataaaagcaggtagtcgtgaattttgccaaaattggctgcggtatctgctactttttatgggattaagtttatttaatcaatttattgttattccactttttcgctatattacaacctttgttttgcaggctagtgctattccgttcgtatcttatcgaaatgtagtgacgatcattacgacgcatacggttgcctttttaattttgataattgagttgctgcttttattagtaatcttgtatgcgcaattagcttatttacttcatggcgtttgggatattaagcatcaagtttttacgtggaaaaatagttttattcaaacttggcaaaatatcaaaaaaattcgtttgggcacgctttttattttgatgctctattttttattggtagtaccgttagccgatgtcatctttagaacaccacttttaagcaaagtgcagatttcagaatttatcttggattatctgacgagaacgccaatcttgttagccgttttgattgcgttttatttagccgctttgatccttggtgcaaggctagtatttgctttacccatcatcgtttttgaccacttaaagtcagtgcaagcagtaaaaagaagttggcgattaacggcgcactaccgttggcggacgatttgctggaggattattgttttagccgttttatctgcagcagtcatgacaattttctatttagcaatgtattgcctgcagctattagttgatttattacctgggaaatgtccgttaattttagccattagcaatctttcgcttgttcaaattattagtgaagtagcgttagtctatgttagtgtactgggcttatctattattttgaaagctttaaggcaagaaaagataagtcaaacaggtaaaactaaaaagataattctaagtacattagttgtgtttgtactagtaatgattaatgcaatatctaccaattatttatatttgactagtgtaaatgctaaagcgccagtaattatttctcatcgcggcgttgatgataaaaatggcgtacaaaacacgttacagtcattaagaaaaacggctaaagaaaagccaaactacgttgaaattgatgttcatgaaactaaggataaaaaatttatcgtaattcatgatgagaatttattgaagctaacgggagttaataaagccccgaatgatttaactttacggcaattagaaaagttaactgccaaagaagacggctatcatgctaagttagttagctttgatcaatatcttgaggaagccaaaagactgcatcaaaaattgctaattgaaattaaaacgacggctaaagattcgaagaaaatgctgcagcgctttaatcaaaaatatggcaaaacgattcttaaaaatgcgtatcaagtacaatcactcgactatcgcgtggttgaaggactgcacttaattaatccacgtttggttgtcttttacattcaaccttataattttacttatccgcaaagtgttgctagtggatattcaatggaatattctaccttgaattcagactttatttggcaagcccatttgcaggatcgtcctgtttatgcctggacagttaatgacgaaaaattaatgaagaagatgatgtatcaacaagttgatggcttaattactgatcgagttgatttagctaaaaaggcaattaaaagtttccaaaaggatgctagttatgctacgcgaatcttaaattatattgttgtcctgcatctgtcgaaaaattttgaatctgcatgaagacttgatctgaagggctggacatggtaaactatactagattttcgaaaatctgaaaggaagtatagcatatgcgtaaaggtgaaaattacaacactggttgtgaaccaaatcaaagacctaagaacaagagaaacgcaaagaagcgtgttgctcacgtagcagcagttgttgctttcttgaacaaggccgcaaaagacgaaaacaagtagtctttaataatattgaaataaaagctaggagctgacgcttctagctttttttgtgcttactgaaaaaattaattctaagtgtataattttttacggtaagttgaataaataattaaaaaagcccaagtcctttgaatttggacttgagctcaaacaaaaagaccagtagtctgatgttaagaacaaaaaacacattagaagctggtcttttatgaattcaattgtaactgaaatcgcaaatattataaagtctgaagataattatattaagcgtgaaagaaaaataatctgtttcttcttaaacctgattaaggaaatcatggccttggctttagctaaagttgatgatgaaatgattaccaaggttaaagcacagcaagctcttagttaaaatcacgccacttaagcgttacccaaaagttacgttagttgtaccagctcataatgaagaattagttattagtaaaactacgcaggcaattttaaatttgaattatccggctgataagttacaaattttaatctatgctgataattgtactgatgatactgctaaaattgcccgggaaataatcaagcaatatcctgaacggaaaatcaatgttcaagtaattgaacgaacaggtagtggtggcaaagctggtgtattaaatgatgctttgaagattgcccaaggagaataccttggtgtatatgatgcagatgccatgccagaagaaaatgctttgtattttttaattaaaaagattttggaaaatccggtgagatataaggctacttttggtcgcaataagacgagaaatgcgcggcagaattttttaactaagtgtatcaatcaggaaattgttgttacccagcgaattcaacactgcggtatctggcaattatttaagattggtcgtattccagggactaactttattattaatactgattatgtcagatcaattggcggctggcgcaatggcgctttgaccgaagatactgatatttcttttaaaattatgggctcaggtagtttgattgccttagcctataattctgaagccttccagcaagaaccagaacgcttaaaagattattatttccagcgcttgcgttgggctaaaggtaactatgaagtggtgatcaataatttttgccatctttttgataaaagcaactggcgggttaaattagagactgtctattattcctgcacttttttctggtttaatttggcgattgttttatcagatctgatctttttttctaatttgattgccttaatcgtccatctttggaatcctgcagtagtaataccatttacaatttcgcggagtaatattttattagctcaaattctgctctttaattggctattgatggttttgctttatattttgcaaattaacctagcgatgactacgcaatatgggcaggcaactgacgaacagatttggctagccttagcatcatattttacttattcgcaattgttcatcattgtatcaattcatgcggttacttcagtaatgctagatcgcgtttttcatcgtgatagtactaaatgggttaagactaagagatttgcggattaggtgatgagatgaaaaaaagatggatgctactaggatttttactcgtaacgattgcatttaccggtattatgatctatatcagagcagataataattcagcggtgcgtaatttttttctacattcttggcataaaaattatgtagttgaagaaaagaatcttgcctatattaataccacgcctaagcaggaacaagtgacggttttatctgaaggccaaggatatgggatgtttattgcggcgcatgatccagcagttaaagaaagcaactttgctaagctagtgcagtattatttaaaacaccgggatcgtaatacgcaattgatggcttggcggcaaacaaagaaaaatggaaaatggagcagtgaacgcaatagcgctactgatggggacttatttattgctaaagctttgtttttagcggctaaaagatggaaaaccccagcatatcagcggcaagggcaaaaattaattgccgatattttgcgttatgaatataatccgacaacgcacgctttaacggtgggcaattgggccgattctaagtcgaagtattataatttaatgcggacttcagatgtattgccgacaatgtttgatcaattttatcgtgaaagcaatgattcgcggtggctcttaattaaaaaaacaatgctcaagcggctcaatcagttgagtcaccagcataagagtggcctagttccagactttgcctggctgacatcaaaagatgctaagccagttaaaggaagggttaccactgatcgatatgatggtgattattatgccaatgcttgccgggtgccaatggatttagcatttagtaaggataaattagcaaagaatactgtacatcgcttgcttaaattttttagcaagcaaaatacaattacagcaggctatactttaaaaggcaagccggtcaataattatcaatcagctagctttagcgcgccaatttatattgcggtgaatgaaaatcgcaatcaaggctatgataatttgtttgcttcgcagcaatatatttttgctaaaaaattacctaaaaataattactatgatgcagcactaacgacgatggcaacgatactgacaccggcgcatagattttaagaggcaaaggcctctttttatttgcattgaaaatcaatctttgataacatagtaaaaattttaaggaaaatgaggaggacaaaaaatgggattaaatgcatacattcaaggttttaacagtttagagtcaattgatcgagcaccgggctacttcaagtatcatcaccactcagtagctgaccactgcttcagaacagcggaattagcacaaatgatgggagatattgaagaagtaaagggcaaaaagaagatcaactggaaggctttatatgaaaagagcttgaatcacgattatactgaacgtttcatcggtgatattaagacacctgttaaatacgctactcctcaacttagaaagatgattggtgacgttgaagaaacaatgaccactaagttcattaaggatgagattccagaagaatttcaagaaatttatactaaacgtctctcagaaggcaaagatgatactttagagggtaaaattttatcaatctgtgataaattagatttgttatatgaagcttatggagaaatcgaattaggtaatcctaacccggtttatatgcaaatgttcaaggaaagtcttgaaacgatcaagaagttcgacgatttagtttgcgtacaatactttattaagaaaattttgccagatctttttaaaggtgatttcgcgggaaaggataagatgcaacgaatagcttttagcattctattgttaggggatgattaggtgaaatttcaatgtagttcatgcgggctgcgcatggactctttgcattttaagcaagaggggttaatgaatcctaagttgaccagtatttgcgacatttgtatcacgcgcaacctgaatccagaagattacgcaaatgatgcggtcgcagcttttgctcaaagcttgctttacacgtttgtcggtgcaaagaaacaagatcaatcaggttttattgtgaaaaataaaaaggaccgtaaaaaatacgaggcctttttacaagattatgatggcaatgaaatcgcccgccaacagattaaaaggtctgatttgaatttggcggtaattaaaagcgaagatggcaagcttaattatgtgcctaaccaaggcgtaacttttgagcaaaatttaaagggaatgggtttggagatcaatttccagttaaacgaagttgattttattgatcgtgaacgcattcgggccaagtataaataccgctgccaatattgcggcagacgtggccacagcgtagatcataaggatcccgtttctcttagtcacaacaacagcttagataatttaactttagcttgtgcggaatgcaaccgaattaagtcggatatgccttataagttgtttattcaactgaatgatcaaatttctgagatcaataaaaagctagttaagtatgaagatgcgctgggtactttgagagaagaatttgagcatcgtcggcgctatttagcggctcaagtacaccttaagggtgttatcaatgatcctgagctaaatgcgattagaaagcaaaataagagcttacaggatgacattgatagtttacaaagtgattatgatgatttgcgtcaaacgcgcaagacgtattttgatacgggctggaaattagctcgcattaaggaaaataaggatattatttaaaacgtaaaaaagcgctattttttgtaaactcaattcaaaataaaaaatgagttttaaaaagatcatccccatataggcaatgtcattaagttaagacattgacaaattatcgacttggacttttaagatcattcatttgcgatttatcgcatttgaatgctcttttttcatgccaaataaacccaaatcttgtttagaaattaggctacacgatataaataatatacagctgatttgggtttgagatttcttttgtcttttcgtcctggtctgatcggaattgtgtaatgactaatttgaataagaatctttttaaagatttcagttgaagaagaaattatatacatagcctggatgacaaaacatgactgtttgaaattgatcgcatattgatacttgcagtttttttgtggtacatatgcttgagcatcaatttgactgactgcgttaaacataatcatgtgggcatagatctccatttcaataaatctatcctgcttggaatgaaactgtacgctacctaaagcatatttcaactttttgaatgaagtttcaatgccccagcgcaaatggtagatttctttgatcctttttaagggataatcggctctatttagattagttagaacaacttcccattcttctttgcctgatttaggatcattaattctaaatttacaggcacgaaattttattgtacataactctccaaagtcccagctgccatctttggtatttttagaccgatattttatatattgacggtaatgatggttaaccaaatgaacgttttctgtagccttatgggtttcataataataattagaggtagtcacccagcaagctatatccttatcacactcttgattaggcaactcagctacttccttaaatgcgccatatcccgttttagtacgtatgacataataacagttaggcaggcgattacaattttcaatcatgttacagccggtataacctcgatccatagtaactatatatggtccgcaatttagctttttaagcatttgaacggcggctttacgttcatccatctttgacttaggctgaaagatgcagtcttgataagtattatttaacaggtcatagagtgcattaacatgaatttggcaatatggctttcctttatgattgagatttccaacgatattctctgatttaggattccagatttgattaaaatcagacccatcaatggcaaatatacgatatttatgatcaaataactggatattaaataaattctgattaaatacagttagaatatgcttaaaacatgcgggtgaaagctgacctttgcgttggacataagcggaagtactgactactttatcgttatttttaatagctttttggccaaaagctctaaacaactcactggtcaaatcttttccttgcatattaatagtagttttaatgactgtagctgcatctaaaaaccgcttcctagtgaaggcatgaggatcatcgataaaatcatgaatatgctttccagtatcattgataatttgatcaagacgatctaaaatatttctgtgaagggctttcataattaacaccagctttctggcaataattttgaaggtttaataatttaatcagagggcgaaaaggtaggttcttttcgcctttattttatgcaaaaaaagaaccaaatcataatgattcggttctacagagattagattcaatttgtcaatgtcttaacttaatgacattgcccatataggaatgatctttttaatttttatctatctaattcgatcttctggatcaaataaatatttgtcccatttaacttcattttgaacagtagggtggaagagcaagaatgctagcaacagttgaccaacgtaaggaattacgcccagccaccaccaaccaccgttaaagcctgcgtcgtgcagacgacgaacagtgtgacctaattgtgctaaaaaggcccaaatagctgctgcaataaagaaaataataaaaatgatgaagattacaccgattaccttggcatcgccagaatcaaattcagtaacgctgaaaggagctaaaagcatgaaagcaagtaggtaacaagcaaatacgccgattgtcatgataacttggctaattgcagtacctacccagaatgaggttctagtagatctagcatcccacttaaagcagtcaaagaagtgttccttcaagatttgaccaatagttggtacaggaacattactttttgcgccacccttaggataatcttgatcgctgaacaagtatttgccccacttaacttggcgttgaacagatggctgcaattcaagataaaataaaaacattgcgccataaccagtgaaggcagcccagtaccaatagccgctgtagccaacatcgtgcaaacgtcggatcgtttgtcctaatgcagctaaaaatagccacagataaacaacagccgcaacaataccatcgactattctaatgccggggttgatgttttggttaaaagcatagaagccaagaaggatgcataagatgccgataacaagattaatcaaagtgctccaccagaaagatttacgcgtagttcttgctttccagttgaagggatgcaaataagcctcgttcaaaatttgcgcaaaactttctgcaggcggcagtggcagactttcgtcataaggcttgataaaataatatactctatcattcattttacttcctccaaaaattaatttgttataaattatacgctaaaaaagccgtgaagcaattaaacttcgcggcttttttgatattagaattcattatttctaaagttgctcaagaacttttgcgtcttttcattcttaggatggtcgaataattcttccggtgaaccttgttcagtaatgataccgtcactgatgaacaatacgcgatcagaaatactcttggcaaagcccatttcgtgggtaacgatcaccatcgtcaaaccggttgtagcaagcttttgcataacgtctagtacttcgccaaccatttctgggtcaagggcactagttggttcgtcgaacaataaaacttctggattcattgaaatcgcacgggcaatagctacacgctgctgctgaccaccagataattgttgtggcttagccttaatgaaaggatccatgccaaccttttctaggtttttcatggcaatcttgcgtgcttcatctttagaacgtttcaagactaattcttgaccgaccatgcagttttctaaaacatttttattttcgaatagatcaaactgttggaaaaccataccaacctttgatctaaaggtattgcggttatagccgggatgcaagatatttttaccgtgaaaatcgatctcgccgccagttggttcttcaagcaggttgatacaacgcaaagtagttgatttaccaccaccagaaggaccaatgatcgttacgatttcgcctttattgatgtcaaaggaaatatcctttaatacttggtgatttccataagacttttgcatgtgctttaagcttaaaattacttcgtttgattcagtcattaattatttgcctccgcatcttttggagtaccaacttggacttggttagccatcaagttgtaattcttattaccttcaagtctcttttcgataaagttgaagattctagtaatagtaaaggttaagatcaagtaaattgctgaaatcattaagtaagttgggaagaacttgaatgattgactggcaatagtagtaccaacgaagaacaattcagaaactgagatgatactcaatactgaagtatccttgatgttaacgataaattcgttggtgattgatggtaaacagtttctaatagcttgaggcaagatgatatgccacattctttggttgtgggtcataccaagtgcactagctgcttcgaattgaccttctggagttgaaataataccaccacggataacctcagctaagtaagcaccagtgttaattgacacaataatcaaagcagctacagttctatttaaattcaagtgccagaattgggcaataccatagtagattacggctgcttgaaccatcattggtgtaccacggaagatttctacataaacagataataaccacttaactacgttcaaagtccaacgcttgccgcgagtagttggagtaggaatggtacgaataattcctacaagcaagccgataaagaaaccaacaatggtaccaactaaagctaaaagcaaggtcatgccaatacctgacataatcatgccaccatattgcttccaagtagtaactagccagttttctttcttagtttcgttaccagccttaggttgttccttgatggcttgtgacattaattgatcacgctttttattagaaatagttcttaaagtagcgttaacttcatttaaaagcttggtattaccctttttaaccccgatactagttacggaatcgtcatggtcaactttgaagccagccattttgtttaagttaactgcaataatgttagggttaacgttgtggtaactttcaaattcaatatcttcagcaacataaccatcaatggtgccagaagctaaactttgacgcatggctgaaaagtcacgcatagctggttctcttttagcaccttttaattgcttgattaaatcgtagtgcaaagttccttgttgtgcggttaacttggcacctttgaaatcagtcaacttcttagcattagaatatttacttgccttattagtaattacgacgaaagtacttttacgataaggttctgagaaattaattgccttgcgtctttcggcagtaggagacataccagcaataatcaagtcgattttgcctgatgtcaaagctggcaatagaccatcccattgagtcttttctacgattacttttttgtgtagtcgtttaccgatgatcttggcaatttgaacatcataaccattagcataggagttagaatcatcaattggaacagctccattagctttggttggctgagtccagttgtatggaggatagtttgcctccatacctatttttaacgtgccagaatctttcttagcagcttgagtctgattgctactaagagaaaaaccgataaataaactgagtaggacagacattattacagccatccatctaaatcttgacttcaattataaaacctccaaaaatagttttaacataaagccaacacaataaagagtaaacaaaaacctcgctcttccaaagaattgcgagggtcataatcatcagtgtttaaaccaaatcttatagcgctccctgggaactaaccaggacagtctatagaatattcttctatagcccaacagattaacacgcgaatattaaatctatttcggcggcaaccctaagttaactatcattgttttcgcgaactcaaacttaacttgtgattgtcgcaacctctattgcattggaaaaatatttaactaatgaagaatactagaagaaaaagttaaatttgtcaagcccaaccattattagtttcataatttctctttttcatatcagaaacataaggatttcctgctacataaaaacgtaattttttgttagcccaaacgggatcagattgattgataccaacacgcgctgcagcaattatttcctggggaatttttttatgacgatcatcaagatcaatggcgaaaggggagtctgataaaaagtgcaaattccaatttttatcatgaataccaaaagcttgcatcatttttgcgggaccattagtcaaaagaacgccatctttaccatgacggttcttgatcatggtctcaattcctaaagtgggatcgattgcacggattaaaacaccctgtggttcattctgaaccctagtggcaacatcaaagaaaaaatattgacgttgcgcgtagatatagatcgttccgcctttgccgtaaagtccttcattcgctgggctacgacgaccgccataagaatgtgcagcgcgatcctttttacccatatatgcttctgcttccacgatatagccgcctaatttttcttgaccattatcaaaagtaagcattcgcccaattaggtcttttgcaatataatcggtagtgttagtagaaaaataagttgaataattcatttttgacctttctagaaaagagataaaaaataatgacagaaattaaattagttcgaatttatgaccatgagcaacctgctggttatcggattttagttgaccgtttatggccacggggaatgagcaaagttaaggccgatttagctgaatgggataaacaaattggccctagtaaggaattgcgtcagtggtttaatcatgaagatgaaaaattccctaagtttaagcaaaagtatattgaagaacttaatcataatgattatacagcggaatttttgcaagatgtaaagaagcatttggctaaagaagatgttcttttcttatttggtgccaaaaataaagagcacaaccaagcagttgtactcaaagaatatgtattaaatacgctaaacagttaaatatgtttgtgaccgtgttttttaactttccaaaagtggaagagaattgtcaaaattaagatcgcaaagacaataattgcaaaaacggtgtttggcaactcaaatctcaatggtggcagagctagtagcaattttaaagcgatgattcctatcaataagtaagccattggctgcaattctggaataatatccattaatttaatgataatttcggcaactcctctcatacagagaatgccgatcatgccaccgattaaaacaacaacggggttatcagacacggctaaagcagctaaaacagaatcaattgaaaagacgatatccattgattcaattgaaataaccgtacgccagaaaagagatagcacatgtctctttttctttttgcctttgtggcgagctgcttcgcgctcttctttttctttctcatgttcggcagcttgtttagggtggcgttgatcatagaagaatttaaaggctaggtaaaaaagataaatactaccagctaatttaatctcccaaaagttgatcagataagtcccgattccgataacaataaagcggaataaataagcaccccacaagccataaaccaaggacttgcgttgttcagctttattaggtagcacctgtgtctgtgcggccaaaacgacagcattgtcgactgataacaagcattccatcaagattaaagtcagaatgatcatccagtctttgccactggttaggacatgtaaccagttattgccgtcaaaaaagggtgcatatagtttaagaattgacatgtagttgcttcttttctaatttaattaatctgattttttctttttgtcccagacgataagtcccaactttattgttggataaaataactctttggtcaggaataaaaatcaaaacagggtttaatgctacggcgtgtgcaactgagcgagaagatgtggcttcggctagtgaattggcgacgtcaccataagttaacgtcacaccataaggaatatgctggacaacggctaatacctttcgttgaaattcagtgccgaattccgaaatatcaataggaacatcaaaattctttctgataccagcaaaatattcctttaattgtttgatatgaggtgccatctttttagggtcccgcaccaacatgcggtgagggtagaagctaaaaataggtgaaacagtttcatctcctttaagtccgacgtaagttaggccggcttctgaagctgttaaaaagtaggtccatggctcaattgtaacgtaatcatagtaaaaaaactctgtcatgtgtaacatctttattaaaaataattagtctaagaataacaaactaggaaagttaattcaaattctggaatgctgttaatgcatccccaattatttgcgtgacaccaggggtaggaatttctgtcttgttgatagagtaaattttggcgtcttctttgcgataagccaagagctgggcaaaaggataaactacaaaactcgtcccacaaatgatgatcaagtctgatttttgcattatttcaacggactggtttaatactttcggatcaatgccttcgccgtataacacaataccggggcgaataattccgccacaatctttgtgtaaatagcttttagcatattcttcataagaaacaggttgatgacatttagtacaataaatattatataaattgccatgaaattctgttacatgttgattgccagccttagtatccaaagtatcgatattttgggtaattaaattacctttttcattacaaaaatgggcgattttttcatggattaagtttggtttagcagtaggaaagtacatattgttcatgacaaattcatggaaaaattcaggtcgattgaatagcgtactatcgctcagtatagtttcgggactttcttgcacgccatcatagattccgtttttagagcggtagtcagggatacctgagtgggtagaaacaccagctccagttaagaatacaatatgttgggcattattaatatctgtttgtaattctgctaaatccatcatataatgtcaccctccgtgaaagtcactactttaattataaatcattgttttgttataatgactgaaaattgaaagcaccaaaatcaagctcaagtcctgtcactattgagctttcttagacgtaattagtttttatatgatctgtttcagtgcaatttgtatgaatcgtggcagttggttaataaagtcattgattacttcatctatcttttcaaaactattctgtttaagctcttttaattctgaaattaagtagaccaatgcatctacgaatctaatatcaggtaaggattcgttcattagatagaataaatctccgattgtcttatcatctgtattttgtctttcctgccaggtcaatagatcataagttattgctgtaactgcgatatagccacattggccatcatagctttgaacttgagatttatctaaagcaagatattgcttagacgtcttaaaatatgtttcaatttgccatctacgaccataaagttggatgatttcttcagggctaagctttgtctgagtagtagctaaaaccaaatgcttgttcttgtttccacggttggagacaaagacgagctttaataaaaagctatgtccatgatattgagcctcaactatgcttgaataaagataatgtttctttttacggatgtttgaagcagccaaacgatcatacaagtctttaacgctatagcggcgatggcgataaatgtaataaatctttgaactcttcttgatcatgccaagtccatctaaaccgatcttctttaaaatccaaaacattcttggagaagaaaaccaagaatcgaataagacgtatttagcttctactcctaatcgtaaggcttgtctaatcaactctacagttacatcattcatctttctctgagcttgatttctccttttaccagaaattgaacgttcatcagcagtaatgggagcagctccaatcatatttttcttggttttggttgacatcaaggcaaagttaaccggcaagaaggtattgccatcgctccagcctaaagttaaaccacgatatccgttcaaatactcatgcttgtcatggtcatagactttagctagcaattcggtctttttagaaaaagaccgagccatcagcgtatcgtcaacgataaaagcaagtcggcgtcttttatcgataaatggttttaagcagccaatgagccgggctgcaatcaagcataatagtttttgccagttgattcttccatcgttaagtacattgcgagcagttctaacggaaaaacgtttgtcatccttagctctgaataaagaaagccgagcaaaatgtactgacatcagccaagagataatcatggttaatgaaacggtggatttacgcttaaaattgacttgtttagttaacttagctagaccaattagattaataaatgaagaaattaaggatttagtatcattttctgtgtcgatttgttctatactgttcattgcgcaggatctcctttactttttaggtcgacacttaaagtataacgcagagagagcctgcgtttttatttttgataagaaaaagccaagaggcgcggggaaggagcgttaatcttagctttcaagtttcagtataatgattaaaataactaaattgaggggatttttatgaaatatatgacgtatttttatgtagcaattgatattttattagtagtttatgcttgttatagttggtattggcaagctaaagttgattttcgtggtcgctatcgtatctcctcagttgtttgggcgctaatttttatctggctgggctttacatggaattacattgaaaaaggtgatccaggcctgagcgtcttcttggctctttttatcttaattagtattgtcgatggtttttcaggatttagtaaaaagcggatggtcgtttcaggctacttcaagcgtacagttaagtatgatgatttagccagcgctactttaatccagatccccaaccaagagaagccattagtgatggcgatttttcgaactagcgatggtaaggcttatatgatgcgctttaataatgaagttaatagcgtaattaagcaattacaagaatatgctggtcgagaaattcctgtcgaagttcaatcaatgatgtaattacaaaattggagaaagcattcgcgagaatgcctgcaaagtccgcaatgcgcgactttgcttttttatttcttccttagttagtaaatgcgagtgtttcatatcttcttcaaaagctgccaccattttctggttgaactttttatcataaaaaacggcattatcttcaaagtttaagttgtaagaacggaaatcttgattcattgaaccaactgaagaaaaatggtcgtcgacaatcgtcgttttggcatgtaaaaagccatcttcgtagatataaattttgacacccaagcgagttaattcgttggcataccactgtgtggcgcgataaataaaggggtggtctggcttacatgggatcataattcgtacgtcaacacccgatgaggcaattgtttgccacgtagcaaaaacggcatcatcagggattaagtatggtgtttgaatccataaccgtttgcgtgccaaaagcattagccgcatcataccgttacgcatatatggtgcataacgatcaggcccatctgaaatgatttgcgttgcaacgtcgccttcgtggatgtttttttcatcaagatcaggaaatagagtggaattgaaacggatgagctgttgattattagtgatagaggcgttccagtccatgacgaaacgctcttgcaaaagcagagaggcagaaccaacaattcttacctgactatcacgccaatgaccaaacttcttttttttgcctaaatattgatcaccaatattaaaaccgccagtccaagaaattcgcccgtcgatgacaacaatcttgcggtgcaagtggtagttaatgcggtaacgggtgatcatgttgcgtgaagtgataaaaggcaaaacttccccgccagctgcccgcaattgatcgaaccatgctttagtagctcccattgaaccccaggcatcataaattacgcgtactttaactccttgttttgcttttttaatcaatagttgcaaaacacgattgccgatattgtcgctataaaaagtgtagaactcaacattgattgtttccttagctcgtaccatgtccttaagcatgtcatgaaagaaggtttcaccttcggtatagagcttgacctgattatttttagttaggggagcttcttgttggtggttaaaaaagttaattgctatattaccagcctttgaagtgtcagaaggactagtatttttaggtgctttagcaatcgatttttgaacatttctcaagccaatgtgtttttgcttattgatggcaaaaatattttcctgggaaataccccgaccaaagaaggcataaagagtgatcccgactactggtaatactaacaggatgattaaccaagcccaagtggttgaaacggatcttctacggtggaagacaacgtagaaggctaagattgtgttggtaatgataatgattctaacaaagtcatgccaccagatcataaactcctccaaaattaaactacttttttaatttaagaaacttgtcaataatatcgattacaaacggattgtcatgcatccaactatgttcggcgtcatctttaccgcgtacttctacttcttgataaaaatgtgcttttggggcaacgatatagcgaatgctttttgcggaaacaacagagatgaatttatcagtatttgtgttatctaaaacgttgccataaatattcaagactgagatatcaggattgaatttgcgccgattaaaaaacaaataaaggtagtgcgggttcatgacactaggccgaccactttcggtcaaatagttgacgtttgggatatcgcccaagtaagtgaccccgtcaaaaggaccagcgataaaggcacatttttttaaatgtgggaacgttttgctgcggtagtgcttcatttccgtgcgaataatacatggacaagctaatgaatgagcgactgcaatatagtttttaaaaccatatcttttagctaaaaagggcaggacgaagttgagataatagtcgatgccatagataccgactattcgctggcgaaaagcaacctgcacgataggatgcttgtcactagtccaagttccttctaatttgaaatttcctaataaatcaacggttacctttaaaaacttgggattgcccttgtcatgagtagcgtgtttcaccatcacgcgagtggtataatcaccgccgcgaaagccatggaaataaataatgggtacttgttttagatcgcttttttcaatgtttgccttattttcaatatggcgcttgtgtaatttgaggaaaattcgcgtgggagcgaaggtggccatcagccccaaagaaatcatgttaaacatgctaggttcttcttggaggtcatgtttatgatctttttcaacttcttcggcatatttttttgtgttgaaaaacatttttaccaccttctctttcttttttcctataataaaagttatgcaataagtatattttaccattgggtaaagattttggaattttagaggtagaaatgaagttttatgcagtcaaaaaaggacgtactccgggaatatatcggacttgggatgcagccaaagaacaagttgatggcttctctggtgcagaatataagtcatttgaacaaattaccgatgctacagattacttagattggaatgcccaaactcagagcgatgtcctgcaaaaaggtgaagataatttacaaaacgccgtaaaaagggtgcaacaaaagagtcaagaaataaaaaaagcaccgcgaaaaagggcgaagcagtataaccatgttaatagcaatcctgctgacttctttgcggtgacttatactgatggtggcacgcgcaatactggtgtttataagggcggtcacgttaaaaagaccgataaagcagcctgggcttatttaattgaatgggatgaccagaaagttcatggctccggtggtgaatatggtgctactaacaataagatggagcagacagcattgattaatgcactaaaaaagctgcttgagcttggttttaacgataaacatctattatttgttcttgattcgcagtatgtgttgaatgcgattaataagcattggctacaaggctggaaaaaacgtggttggagacgttcttctggaccattggctaatgtggcggaatggcaggaattagatcggttattaaaggaatttcctgatagtacgtttgaatggacgaaaggtcacgctaataatcgcggtaatgaatttgtcgatcatgaattgaaccgttatatggatcaaaaaatgtaagaaaaaaggctacactgtagccttttttaatttaaaataacgccgccgaacaaaccactaaagaacttaacgatttgatcccacaaattttgtaaccagttgcggttttcttgggtattaaatttattgaagatatttttagctccattttgaatctgactggataatttcgaagcttgttgcttgaagttaccgtccttcaatgcccctgaatcacgaatttcaattagaagattgacaatttgatttttttgattgttgttgatggtgtcacctaagtggttaatattaatttgattgttgacaatgtcgcgaatttgactgtcggtaatgttttgcccttgtttagccatctcattcttggcaccggcaaccgcattgttcaattgagcatctgaataaccttttttgtttttattatcttgggtaatcccagacaaggtattcatttcatcttgagcggcattaacttgcttttgatttaatgtattgccatttttagcataggcagcataaactccagctaatgcccctgaaccatcaattggaatagcgctagtaacataaatgttggcatcgctgatgccggcggtcagggctgcgtttttgtactggttggcagtaatagtagtgatattatttttaccatcgtagtctaaaattttaacgttgattccgctgcctgagctggtcttttgaatcattgcactggaccaaacgcctgatgaggtagtgaagttatcaccggatggatttaagtatttaaccagatctgagccggtaacagtaattgtttgataattaccaccgtttagtggggcggttaaggtctttaatgtgccttgcttttgcgcatcagttaatgatgtacctaaggtaactacaggtgtatcatcatctgctaatactggcttagtaaatgagatcatcgcgaccacgcttaataacattgctgtgagtagtgtgataaatttcttcattttttcttcttttcttcctttttgatcgaatatttattcttgtaatacggaacattatactaaatatttttcaaaagtgaattaaacaacacgtaaaactttcttaatttcgaccttattattgaagatggtataataaagagcaacaaagggggacaatatgttacaagtgcctaagttaaccatcatcatgcctgtttataacacggcgcaatacttgccacgtgcttttgatgctctgcttaatcaagttgacaagagcttcaaattgcttgtagtagatgatggctcaacagataattcggttgaggtagccgaaagctatgccaatcgttttccatattttaaaataattaaaaagaaaaatggcggcccatccgatgcacgtaatgttgggatgcagtatctcgacacaccatatgtcacctttcatgatggtgatgattgggtggatccaggctacacatccttttttattcatgcttttgaaagtcatccagatgtcagcttagtatcatgtggctattggatggattatcctgacaaaaagcaacgcgttgttggtcgaccagaaggtggctatttaacgcgcggtgaaacttatttgaagttgactaatgtctttagctcaccaatgaaaggatatagctggaacaaggcctataaaactgccattattaagaaatatcatttgaagtttgatagggatatttcactactggaagatcagatttttaacgttaaatatatttctgtggctaaaggcgtctattacacgcaaaagccgtattaccactactggcagagaaagggcagtattattcaccagcctaatattaaaaaagttgcggataatttccggggaaattaccgggtttggagcaaaattatcagtacaatgatgaaagaccgcgaggaagaaaagatgcgtaagaagttagagcgacagcaggccttgcgtgatagtgaatagaggaaaacatgaaagaaaaagttaatggagtcgaaatttattatcataagttaggtaaaggtgagcctttgcttttactacatggacatcacttagatggcggtatgtttgataaaattgtggctccgctttccctttattacactgtctatgtgcttgatatgcgaggccatggtttaagtgaaggcgacattgctgaacactacaagactgaagtagaagacgtttatacctttattaaacaggttggcattgaaggctgctattgctttggttttgatgcaggtggtctggtggcaatgatgctagctagaaaacatccaacgatctttaagaagatgattgtagctggcgttttcgttaatggtgcaggcattagaccatatcactacttaacggaaggctttcatcgctttttgagacttgatcgtgacagccgcgtagagttgactgagtcctttatttcagtagatgacttgaagaagattactacgccaactctttgtgtagtaggtgaaaaagactgggttaaggttgagcatgtacgttggtatagccaatttatgccaaatgcgcggttggtgattatgccacggcagacgcatgacagttatgcagtgcgcagtttaaaactgctggatttgattaaaggattttgtaggtaatacgcgtggtgctagttaaatcgttctaggcaatatgccatattataagctaaaatggctatttctagccgctgctgaaagccagctaagctccttgctcggttattttcagcgttatagtaactgagcaaagaaaagtcgctttcaattgttcttctaattgccatcagttgatgattattatgttttttagcacctttcatgttttttcgatatggtgtccaaaggacatagcccataccttttaactcggcagctaagtcttttcctaagtagccttcatcgcctaaaagataatggttaattggatgagcattaatcatcaattctgtcgtttctttggcatcatgcactgatgctttagtgactgcgtagtcaagcaaatagccatcatcgcttactagcgcgtgcaccttgaaaccataataatagactttcttggttgctttatagccaatatcggctatgtcacggaagatcttaacacgataattacgaacaggctgacaaactggaacaggaaaactgtcaataattaaaaattctccagcaacctttacctcttgattccaagcttgacggatgcagcgaattaaaggcaaaagcatcttggctcgacgattaaagcgagaatgagataagccaacaaaaaatttacagaatcttctttgggattcaattccaatttcagtttgccaaatgagcatcgctaagatggagctgtcggaaagctttgtttgatcaatgttttttcgatgcgtaagcttatcaggcgcataaagattatatagtgaacgacaaattacatttaaacgactaaaactaacttgtaaatggtgagagaaacgattaagcttgaggtagttcaattagatcagactcttttctatttaatttacttacaacttgagtctaatccgattggacttttttattaactaaaacgatttaactagcaccacgcgtaggtaatgtggatagtattgctggttaacgtgatagttgctgcagttgctgttatatttggttttcaaaatagggtagaaacattaaatctgttcaatgccggtatagtttttatcacttttgggattgttttacttttaggtgcaattcctgtttatcaagatttcagcacgtcatcaattttaatgttcattgcaggcattttaattattgttagaattattatgctagctgttagtttaattaccaaagtgccaagaacagtaaatctacaggatattgcaatttcattgatgatcgctgcagtttgtttgatatatttcatgcacggtttaaatctgagcttaagtaatttagtcgtgccagaattagcattgattattggcattattttgttttattttaaaagaaagcgtcaataaaattgattgcaaacatggacatctcttcaatagaggtgcctttttgtatataatggtggtgtatacgatttttattcagaagaggtaaataatgaacaaggaagaacttcatcaattattgcacccaatgaaagttattggcttaggtggtaaccctgcattaaatgaaaaaattgcggcaattttacaccaaccattgatcgaaactgcggttcaccactttagcgatggtgaaatccaagttaacattggtgaatctgtcagaggttgtgatgttttcgtaattcaatctatccaagatccagttaacgaaaactttatggaacttgaaattgttttggacgcacttcaacgtgcatcagctcatataattaacgtggttgtaccatacttggcatattcacgttcagataccaagactcgttcacgtgaaccaattaccgctaagttagtggctaacttgcttcaattgactggcatggatcgtttaattactgttgatctacatgcctcacaaattcaaggtttctacaatatccctgttgatcacttacatgccattccacttcttggtcaatacttcttagataacggaattgctaccaaggaagatgatgatatcgttgtagtctcacctgatcactcaggcgctaagcttgctcgtaactttggtcaatacttcaatgcaccgattgcaattgttgatcaaagaggtgctcgctatgatactgaggtccacgacatgattggtgatgttaaggacaaaaagtgtatcatcattgatgatttgattgatacaggttcacgtatttcttcatcaactaagtcagttttggcagctggtgctaagaaagtttacgttgccgcaacccacgcacttctttctaagaatgctactggagtacttaatgaattaccaattgagcaaatcgtagttactgataccattaagcacaagcgctacccagacagaatggtcagaatttccgtagaccaattgcttgctcgtggtatcgattatgtatacaatgatcgttcaatccaccaaatctttgacgaacaaaaccgtttaaagtaaaattcttattgataatttgaataaaaaatgatcctcactatgaggattattttttattcaaaaaatcgggtagataagttataaaactatgtctaaatagtaatgattgatataattgatatgtgttgtatagaaagaaaaagagaaagttagaggaatagactatggcacgacggaaaaacatgaagagacggagagttattctaggtaatactttccatctgatcagagaaaatggaatggataatgtttctttgcaaatgattgcagaaaaatcaggcatttcaaaatccttactgcagtcatactatcctcataaggctaagttaactaacgacattatccgcaatctttttaatactttaggtcaacaagttaataattatgacatggctaatagcaatcttccttatgctagaactaaggcatttatttatacgattgctatcttggggatgcacgatgagggcttggaccgtattatttctgaagcttttgttagcaatgctaccctagataattggggaatcatgcttaatgaatggattaaggaaaatcatttatttgatgacattaacgttgacgaaagcgaacttgagacaggaattgcgtttgtaactagtggtattggccgtctatatcatgatcgcaaaaaacaccatttaacggccgaagctcttgctaactatgcaacaagtgcattgatgttcagtttcttgcattgttcttctgaagaaattgatcaagccttaaaagaaggacatgaaattattgaaactgctgatatggaagttgttcaccgagcaattgatacaatgttcgatgaaggcaaggaaattttcagctaaaggggagtcgccatggttgaaggcaaaagagctgatttgcgacgaatgggttatgagcaaaataaccaatataaacgtttgttggctttcgtcatctttttgattgctgcattatcattgattacagctacttttttaaatccaatctttatgaaaaaacagattaggactagctataatagggcagtagttgttcgccaagtgaataaaaattatgatagcctagctgatttgattaatgcagatagtgaagataattcaaacttactatcggatacgcaaactcaaccaattgccgaccatattattgattattctttgggtattcattggtttaaggttactagtttgccactggctaatcagattttaagcgatatcgatcaaggaattgctaaaggctcgtcaagtggggcacaggaagttaaccgtaaactgaaaaagcagggaactaatgcaccttacgcgattattaaagccttcaatttaagtgtgatcactttaggagcaaatattgctggtttattgtttatcgttaatttgataataattattgttaccattattacaatggtttcgctactcaacgatatgaagtcgcgggctacaattcgaatggtgattcatgatacgatggctgctggcatgtgggcaggtttttggctaattttgatttcaggcttgttagcacttgtgccagtaatctttaatgtcgataatatcgaatttggctttttgcttgagattggcagtagcgtctttttggaatatgtaattgctggggtaattatttacatcatttgtgcgataccatggcaaattacagctgctaaataagaatgagaaaacgtaatctgtagaatgattacgttttttgtttgcacaaagaatcatctttctttataattaaaaaataattaacaaatttcatatgtttatattttaaaagaattgggcgagtttatgaaaaaagctaaaattataaagacttttcttgctttcattactatgctttcgactctttttttgtttaatcagcctgttaatgcagccaataaggaggttgagactggctcagtgatgaaaaaaattaagcagtcgaaagaattagtagtgggcacctcagcggattatccgccactggagtttactaccagtgaaaatggcaataccaaatatgtgggggttgatatcgagttggcaaaagatattgccaaggatttacatgcaaagctagttattaaaaacatgagctttgattcacttttggtagcgctagagacaggcaaggtagacatggttatttcggctatgacacctaatcccgagagaaagaagagcgttgatttttctaagatttattacaagccaagtggcgaatatttcttaattaacaaacgcgatcaggccaaatacaaaaaaattaaagattttgctggtaaaactgtcggtgcgcaaactggtagtattcagtattctttgattcaaaagcaaatgaaacagtctaaggttaaaggcttaggcaaaatcaacaacttagttctggcattaaaatctaataagatctctggcattgtcatggaagaaatgactgctaaggcctaccaacaaaacgacaatagcttgatggctgtgagaagtgacttgcgtgaacaacaagctggtaacgcagtagcaattgctaaaggacaaaatgacttagtagctgctgtgaacaagactattaatcgcgttgaacaaaaagatttgattaataagaaatacttgcctgaagcagctaagtatatgaagacagcgcagaagacgaacacgatgactaaatatattccttactttattaagggagttggctataccatcgtgatcacgattttctcagtgttaatcgggatcatcttagggatgctcttagccttaatgcgtttgtccaagaataaattgctgcactggattgcagtttgctatatcgaattcattcgtggtacgccacaaatggtgcaaattttatttgtttactttggtgttggagcattaatttctaacctgtcagctgttgtagcggggattatcgcaattgggttgaactctggtgcttacgttgcagaagacattcgttctggtattgcttcagtagctaaaggacagactgaggcggctagatcattaggtctttctcaagctaaggcttaccgctatgtaattattcctcaagctttgaaaaatatttggccggcactaggaaacgaatttattaccctgctgaaggacagttcattggtttcagttattggggtaactgaattaatgtaccaaacggaattgattcagacttcgacttaccgtggtgttttacctttattcattgccatgattatttactttatcatgacatttactttaactagattgcttaattattttgaaagacggatgaaacacaatgactaaaatgatcgatatccaacatttgaagaaaactttcggcaaaaatgaggttctgaaagatatttctgcggaagtagataagggccaggttatctgtattatcgggccatctgggtcaggtaagagtactttcttgcgttgcctgaatgtattagagcgtcctacgactggtaaaattgtttttgatggaacagacttggctagtctaaaggatggtaaggaacttgatcaattgcgggaaaagatgggaatggtttttcagaactttaacctttttcctaatatgaatgtaattgaaaatattaagttggcaccgatgaaagtcaagggtgttagtgaagctcaagctgagaagactggactagtcttacttgaaaaggtgggcttggccgatcgtgcaaaacaatttccagctagtttatcaggtggtcaacagcagcgggtggcgatcgctagagccctagcaatggatccggaagtaatgctatttgatgagcctacaagtgctcttgatcctgaaatggttggcgaagttttgaaaacaatgcaagatttagctaattcgggaatgacaatggtgattgtaactcacgaaatgggatttgctagagaagtagccgatgaggtctggtttatggctgatggctatttacaagaaaaaggcacgccacaggaagtgtttgaacaccctactagtgaacgtgcaaaagatttcttatctaaagttttataatcaaaaaggctcaagcattgcttgggccttttaatttactcatctgtaatgatggggtttgataatacgtactgtcttacgaaaaaattttgatgccatcctttttgaattaatgcattaaaaaaggtgttttgattattaggcaaagcagtggctttgggaatgatgacagcacgtaaaatcttgttttgaagtaaaattggtgattgcacatctgtttcgctatttaaattagtggttgcttgattggtcggcgtgttggttgtatcctgctgaacttgataatttgtagtgtcattagtactatcttgcttaaatagcttgaatctgtacttctgcacgcctttaacgtcaacttcatattcatgtcctgcaactaggttagtatttgcgggtgaataagttaggatcgttctaaaattgccgtagccacaggagctgtaattcttaacatgagctgcagtagtaacaactttagtatctaaatcagtgatagtaattgttggcttatttttaatggttctatctgataaatagagcgaccacatgatatttttcccttgaagcaattcaatagggaaaagacgcatgctaggataagcaactaccggctgactagcaggacgaaaagtatcattaatgtttagtactttttgaacggaatagcggtagccatttgtaccataagctgccccaatgcctgtagtggttaaacgacttgaaagtagccaagctcggtgaccggtatctgaaccagttaaattataatggtcagtaattaagtcagtgatcacatccccagcggtttgctgtgaaacattaaagtttaaatttgaagtttcagaagtgtctttagctagcttccaaacaaatttggagatattgcttggcttagtttcactaggtaaaccatgttggttaatgaatgggttagcattaattgcggccattacagcagccgtaatctgcgcgtttttattaagtgtatcagtagtcgagatagcgggcagactgaacaatgatcgatagtaattgatataatctgtttgcgttttaatgtattttggatctaagcgacctaccttaaattttttgcttagatttggctttttagcataaatatttgcggcactataactagttttatcaaggttcgcatattccttttgaaaattatgaacttcgttaacttcttgtgttgtgaatgtcgctgcttgtgtaacttgtccggcgagggggataaataaagttgcggcagcggcaatagaaaatttccgtagaagcattttagactcccttctatggttgtcagtatacctttcattataaactataaccaatgaaaaggctttagtgaaaaatattccactattttgcgtttttctggtattctttgcgtataattaaagattggaacatttaaaagaggtataaaataatgactaaaaaattacaagttggtttgatttttggtggtaattcatcagaatatgaagtatcaattgtttcaggccgcaacatctataaagcaatcgacaaagataagtttgatgtgcacccaatttggatcactaatgaaggctactttgctaatgaagaagaaagcttcaaggttttagatgatccttcataccaagttaagaacccacataaggttaacaacatttctaacttaattgaattagaaaacttgccagaaattgatgttttcttcccaattgttcacggtaacttaggcgaagacggtgttttacaaggtttgttccgcttgatggataagccattcgtcggtgatgacgtcttaggagccgctgtaacaatggataaggaattcactaagatcttggctcaaagagttggtgttccagtcgctgattggatttcaattaagcgttttgaatacgacgacaagaagaatgctaaacttaactatgaaaaggtagcagaaaaattgggccgcgacatgttcgttaagccatctaaccaaggctcatcagttggggttagtcacgtaactaatgctgacgaatatactgcagccttaaaagaagccttcaagtatgacgataaggtcttagttgaagaaactgttcctggcaccgaggttgaaacagctgtcttaggtaacgacaagccaattgtagcaggtgttggtcaaatcaccaatgcaaaaggttcattctacacttatgaaaataagtatgatgataattcaacttctaagttacaaatcccagcagatttaccacaagaaattatcgatactgttagagaaaatgcacgtaaagtttatgcagcaactgaatgtagcggcatggctagaattgactccatgctcaccccaggtggcaaggtagtcttgactgaagttaacgctttaccaggctttactaatatcagtatgtatcctaagttgtttgaagaagcaggtgttccttacagcgaattgattacacgcttaatcgaagcaggtatggaccgttttgatcataagaaaactttgcttcacaagcatgactaaacgccaaaaatatagaggtagatttcaatgacgactaacaagcatgattttgaagaattggctgcaccaaaagcagctgcacaagaattaggaattagtgttgccacgttaagaaagtattctttaatcgtggagaaggtgaccggcaagagcgactattttgctcggactaagcaaaaggctcgtctgtatcatcaaaaagatattgatgacttaaaggcttttcaccgtttatctaaaaatagtggcttaactttgcaagaagccgctcttcaaatctatgctgttagtgaaaagaaacctgaacctgaaactaaagaaccagctcctaagcccgcttataacagtaccgatgtaatggatactgagcaggtggttaagttgcttaacactttgcaaaagacaatttctaatcaaaatgaggcaattaattctttgcagaagcaattgaatgtcattcaaaagcaaaatcaagatttaattgaagcacaaaagcaattagctgcgccacaagatgatttagataagtttgcggctttgccagatatttctggaattgtgagtgcggatgaacctaaaccgaagagtgaagaagaaaagcgcgctgaagttaaaaaagacatgaataagagtcaagaacaaatgcatgacgagattatgtctaaggcaaaggaaaatgccaagaagcgggctacttcaaatgttcaccgtacactagaagatatgcaattaacggaccaaaaggaacactggtggcaaaaaatctttaagttttaaacaaattgattaagaatcaagagctgacctaacaaaaggccagcttttgttttacagtaggcgtataacaattaataggaagtagaagtaatgaaatttaaatggaaaaagcgctatacgatagcagttatcgtggcaattgtaggagcattattgacggtcttgtcctattttgccactgatatttaccacaaggacgacgttgccgtgattaccgatagcaagatcaaggatactttgattgaaaaaagtgaagatgtgtataaaaatgcggatgaaactcgccagcaaattttgcacttaaaagttttatcgggtaagcacaagggcgaaacttacacgactaaaaacgtgtattatccttcgcaattgacgacgcaaaagtatcgtgcaggtcagagaatttttgtcaatatcaagaagggtgatccagcgatcgttaatcctaagcgtgattgggtgttagttttggtagtgacaatcactttagcattgatggtggctgcagtagggaagcactcactctcgctggttgtgtcaatggtaatttcgtggctgatcttttatttgattatcatttgggatgtgcatttgaatggcgcccacattattttgctgtttggcttagctgatatcgtcttttcattctttagcttgctcattgtgcagggcttgaataaaaaaatgttggcgacttggttggcaacgctgctaggagtatttgtttcttttgccttgtgctacgtgatcatgaagttaacgggtgaatcggaaatgaaatatgagaccggtgactatgcaacgcaagatccacgaggcttgtttttagctcagactttgattggaattttaggtgcagtaatggatgaggcgaccgatattatttctagtttgtatgaattaattcaaactaaaaagaatattacgatgagacagttgattcatagtggtcgaacgatggggcaagaaattatgggaccgttgattaatgtcttggtcttaatttttattgctggtgcgctgccagaaactattttgtacttgcgtgataataatactttagcttcaacttttggctttactctgtcgctgggggcaacgcaaagtgtgatttcggcaatcggaattgttctgacggttatttttgcgacaggatgcagtttgttcttcttgaaaaaacgcgattggaagagtttgtttaaaaaagaaggtgagaataaatgagtacattatttgcattgatcgttgtcttagcgattttaatgacaatcgtcggtggtgaaactggaattcgtagtttttttagtgtgctaattaatacgattctattgatcttagtggcgatgctaatatcatggggaattaacattgcaattttgacgctgatttttattcccttaaagctagttacgattatctttttaggcactcatgactatacggtagcaaagaattcattttattcttccttcttagtgtgtttgattattagcctctttattttgggttgtcaatacctggctcaagctgcaggactaggaccagaggcaggagagttattggttggcttgtcgcagatgccgggcttgagttatccgatgattgccgtgacagtggcgattttctcaactttgggtgcaatcgcggaagccgcggtagcaatgagttcgggcttgctagaaatcaagaagcataaccctgctatcggtgaagaagagttgatggcttctggtacggctattggtaatgatgttttgggtacagcaatgaacacgattttatttgggatgttcggtagttttttatcattattcttatggtatttccgcttgcattacacgattggtgaagttttaaatgaaaagctttttgtaaatgaagcgttaattatcatgtattctttgattggggttatattaacagtgccactatcatcatttatgctatcaagaggaatgagcaagaaaggaccaaaacatgagagtagaaaatctgacgctgactaactttaataatcgtgaatatcaagttgatacatatgcgctagagcctaatcctgaattggttgagcaaaagcgtccgctagctattgtaataccaggtggtagctttaatcacttatccaaaagagaaggcgaacccgtagccttagcatttaacaatcaaggcttcaacagtgtggtgatggaatataacttagtgcaagatccaggtaaaatttaccctgatgcggggttagatgttctaagtactgtgaaatatttcagagaccacgctgatgagtatcagttagataaagatacgcgtggtgctagttaaatcgttctaggcaatatgccatattataagctaaaatggctatttctagccgctgctgaaagccagctaagctccttgctcggttattttcagcgttatagtaactgagcaaagaaaagtcgctttcaattgttcttctaattgccatcagttgatgattattatgttttttagcacctttcatgttttttcgatatggtgtccaaaggacatagcccataccttttaactcggcagctaagtcttttcctaagtagccttcatcgcctaaaagataatggttaattggatgagcattaatcatcaattctgtcgtttctttggcatcatgcactgatgctttagtgactgcgtagtcaagcaaatagccatcatcgcttactagcgcgtgcaccttgaaaccataataatagactttcttggttgctttatagccaatatcggctatgtcacggaagatcttaacacgataattacgaacaggctgacaaactggaacaggaaaactgtcaataattaaaaattctccagcaacctttacctcttgattccaagcttgacggatgcagcgaattaaaggcaaaagcatcttggctcgacgattaaagcgagaatgagataagccaacaaaaaatttacagaatcttctttgggattcaattccaatttcagtttgccaaatgagcatcgctaagatggagctgtcggaaagctttgtttgatcaatgttttttcgatgcgtaagcttatcaggcgcataaagattatatagtgaacgacaaattacatttaaacgactaaaactaacttgtaaatggtgagagaaacgattaagcttgaggtagttcaattagatcagactcttttctatttaatttacttacaacttgagtctaatccgattggacttttttattaactaaaacgatttaactagcaccacgcgtataaagataagattttaacagttggcttttctgctggcggtcatgtggtcagtgtagctaataacatggctttaaataaaaattatcagacaaagtatgattttgataagactgatgttttacctaataagacaatcttaggctatccgctgattgatattaaaaagattggttttccgattccagaagatcaaaaagtaaaaatgccagtagagaaggatattttagatagtgcattaggtgttacacgtgaaacgcccgatacatttattttccaggcatgggatgatccggtggttttgatcggtaattcgattgaatatattggtgctttgaataaaaataaggtgtcggcagaggttcatttatttaatcacggctatcacggcttttcactggctcgtcataatgtagaaactaagggccaagcgtggcaggataatccgcatgcagcgcactggttcaacttagcgatggaatggctaaagagtgagtggggcgagtgatgtgaagcataaaaagtctgataatcctaatgacaatatttaccgcaccatcatcaagaatagaaaaattgaccgaatgattatgccttttgaagcggtgtactgcgtgtggctaatcattacgctggttcttaacttcaagctatttgcatattcgattgacgcacaattcgtgctaatttctctattttttattagtggatgggtttcgtcattaattaagaagcatcgcatgaagaaaagtggaaaataagataagtaaaaagagttctcgcacgagaactcttttttattagaatcatttactttttatctctaaagaaaataacttccttagcagctacaaatggtccagatgacttataaacctttaatctaatagccttggcatcgacatttcttaaaccaacaaccttattcttactgtcagatttccaagttaagtgatcaccatatggcttaaagttaacaccatcatttgaaagctcaacgttaacttcaacaggatcgccttggtgatcaatctttctaggtacccagaccattcgactcaagtgttccaaatgattaaaagtgaaggttaattcaagtggcttgtcttcgctgaccccatcaatggtttcccattcacttgctaacttcaaatcagtcaagtaatcaattggatgatccttaggactagctagactgctcgtgacatgaatgtcattaattgcatagttcattggatcgggcttggtaattgcgccaaacggatctgaccattctgaaactttgttgccagctacataacgcaaacgcagggtgtagcgggtatttggcactagttcatggaaagtaaatgaattaccatcaatgccatcatgtaaaatgccgttaacttcgatttgaacttggtcggttaattgcggccaaactactgttaatgaatgagagctaatcttgtctggatcaaccattggttgttttggtgaacgcaacagtgaatccgtaatagcgtgaaccaaagtttcattgccatatctgaagtttctgatcgtaatctcaattttagaatcggtaatatcgcgtttagctaacttaatttgtaaagcagtttgtttcttttcttggtattgatcaaattcaggcatccagctgtaatttgtgttaaagaagaagccttccttagcatgggcgaaggtatcaacggtaccgtactcctgcatcgggatttccttgtcgttgattttaacagtcaaaccatcaggataaccgtcacacatgatgttcaagttggtggtgttttccgtttggaaagtattgaaatcgccttgagttgggtcgatggtgatcgtcaatttgcttgcttctaaatcactcgtgatttgtgtagctacatggtttcttgaatagtcgttatagccgttatcatcgtaagtaaccattttactcttgccttgagggtagaggacatagttgcgttcgccgaggtcaaaaatagcgccgcctcgtacaaatactggtaaatgccaggatgggtaagactgcttattataaacgcgtccgcccaagtactttttgccatcaaataagtcaacccacattgttctgtggttaggcaagtaaaggttgtcttttcttgaattgccattaccatcttcgcgaccgttaacaattggcgaaatcaacaagttaggccctaacataaattcatggcccacctgtggggtgtagttgacttgttcatgtggaaattccaagaataatggccgcaagattggctcaccgacttgagcgcggtagattagggtatataagtaagtctgcaattgctcacgtagttttaaataggctcgattaatttgcgtcatcttactattgtaagcaaatggggtcttactaaatttaccttgatcgtctaagttgaacaggattggggtaaatgccttccattcaaaatcacgaatggcaatttgagcattaccaccgccagcggtaccgtcaacggcactaccaactaaaggctggcccgaaaggctagcccccaaaaagccagcaacttgtgttggaatgttttcccagttgccgccaatgtcaccaaaggctagcattgttctattttgactaccagcaataccagtattagagaaaatcaacggccgcttacgcttcaaattgttgcgtaaaattagcgcatcatttttcaatacttttggatcggttgtgtccgtttgaataaaggtggtatcaggtgaagccttcggtgtgttgttttgactccaaagaccagcgctaacgtcatgtatagcggcgtattcactgaagctagccatggcttcttcgttgatttcttgcacatcatagttaggcacgatccaacttaatttaaaatgctgcttctggtagcgatcaaccattgcccgtgctgagaattgatattcttcttcgccattcaaagagcccttgccactagcatcttctggcttgttagttctggtgtaataattaccgtcttcaaacataacagcattacgttccttagctttaccaggctgccataaggtagttaaaaagttgccaacatgacctaatcctagtgcatatttaggtggcatcagcggcttacccgttaacatgtaatactttgccaaaatatttttgggtgaattacctaatagataaaaggtatcaaacatgttggtgtcgtgctttaagatagtggcatccggattgcttttaccaaagtcataattgccagcactctcagtattgcgcaattcaccaaagccggagttagcccagaagaatggcacttgggtcaaaacgccgcctttaccggtaatcttgtcgcgcttgattgaaatgatttcacctttatgactgaagtagccgttctgcatcccgccaccaaagtaaaattcattcttgtgttgcttcaaaatttcggtagtttgatcattgcctaattcaagtggactcagctgaaccaaacgattgcggtgcagcgtctcgtcaaagatgctcattacggctggcttttgttggaaaataagttgataattgccagacttaatgattaaggaatcgctggttgccttaggctgtgatttttcaaaatagtcattgttgaattgagacaggtcaacaaaagatgagtgattctcgtcaaacttcttagctggatcgagaaaatatctgaagatcccgtcagctaaaatataaagacgagcaatatcgccggtggagtagtgaagttcataataatgatcacgtttgttggcaccgataagttggcctagttgatgtctttctatttggttttgtgtcatatttattcttcctatttaaacttgctaccttatattataactaaaaatcaaaaaacttcttaagcaattgtactaaaactggtatttaccaattttgttagatataattaaattaacaattacgatttagacatgtaaagaaagaagatatttatgacttattacattcatgcagataaatttttcttagaaaacagaacagaaaacggcggctatcttgaagttcaagataatggcaagtttggctttttctatccagaaagcaaaaagccagaaggtaagattgtcgattatgctggcaaatgggttgcaccaggattagttgacacccacatccacggctcattgcgtgaggatgtaatgaagagtgactgggaaggcatcaataagatctctaagggcttgcttagtgctggggttacttcatggatgccaacaacgatcactgccgcaagcgataccttaactagaatctgtaagatgtttgcggaccatcaaggtcaagaagaaggtgcaaagattcaagggattcactttgaaggaccattcttcacggaagaacatgctggagctgaaaatcctaagtacatgacggatcccgatattaatgaatttaacaagtggctggacgcttctaatgggatgctgaagaagatttcaatggctcctgaaagaaaaggttccaaagaatttattcgtgaagctgttaaagaaggcatagtagttgttttgggtcactcaagcgctagttttgaagaagcggtcgcaggcgttgaagcaggtgcaaccatgtttactcatacctttaacgggatgcctgatccaagccaccacacgccatcaatttctaatgcggcaatgacgcttaataatgtgaccgatgaattaatctgtgatggccaccatgtgcaaccatgtatggctaagactttgattaatgccgttggtccagaacacattgccttgatcactgattgtatggaagctggcatgatgccagatggcgactacatgttgggtgaattgccagtctatgtaaaagatggcatggctcgtcttaaggacggcgacaatttggctggatctatcttgcaattgaagcaagcagttaagaacgtggttgactggaacatcgttgctccagaaaaggcagtgatgatggccagctatgttcctgctaagagtgcccatatcttggacaattgcggtacaatcgcaccagataaggatgccgacttcttgattttgaacccagatttaaccttaagtgaaacttacttgaatggtgaatcacgttataaggcttaatttgttagtctagttttaaatagtcctcattagattgagggctattttttgaccctaaattttggcaaatagtatacaattaataatagtaaagtaggtattatacattaggagaaatttattatgccagatggaatcagtcaattactagtactttttatgtaataactttcaattaattgaataatttgtactcttattgattaaagaaaagtatcacatatgtttcatgaatctcgtctagccaagtaggtgagattttttattatgtttctatgtaatcgctttcaattttagaaaaaatatgctatattatgagtgtaaagaaattaagaaataaaaatattaaataagtttaagtaaaaggagacaggtgagttccgatgggcacttgagagtagaaagtcagatatatagaaaggtttgtgataccaatgggcatcgtaaattgaaaacaaaatgtagttcaataatcatcaagtgatattaatgtacataagaggccgtgaaattattagtaggcatagaataataactagttgatgaatcacttggattaggattaagaaagactttcatacatgataaatattaataagaaatgacctttcgctgaaatgaagtatgcgaagggtcatttaattttggcttaaattttttatccgatgtaatcacatctgtttactacattacgatgtactatattgcaatgtagtaaattacgatttagtaagttataatttagtaaagtataatttagaagatggcgaccaaatgtttattggacgaaagaaagaacttacaaaattagagaaaatgtatcaagctgataaatttcaatttgcagcgatctatggtcgtagacaaattggaaaaacagcattaattaacgaatttgttagaaataagccaactatttactttaccgggctagaagaaaatgaattctataatcttgaacgcttttcttctgcaatcgaacattttaaagatccagatagtctgagcagtgtaaactatggtaattttgaaaattgttttcgagaaattgctcgattggctcaaaaagaaagaatagtattagttattgatgaatatccatacttagctaatgcagtccatgcaattagttcaatgctacagtcttatattgatcatgaatttaaacaaacaaatttatttctgattctatgtggttcttcaatgtcatttatggaagagcaggttttgtcttataagagtcctttgtatggcagaagaactgctcagtttaaattacagccatttacgttacatgagacacaagaatatttcccacacatggataaagaagaggcctttattctaaatacgattactggtggcgttccattatatttgtcatatatgtcagaagacaaagatgtttgggaaaatattgaagaaaactttatggacgtaaacgcgccactttttcaagaacctaataatttattgaagcaagaattgcgtgatccagccaattataattcaattattaatgcaattgcaggcggggcatctaggattaatgatattgcaactaaggctcatttatcgacgccgttggttactagcaacgttactaatttaattgagttaggcattattgagcgcaaagtgccggtaactgatcaggctaagcctaaatcacgtaaaacaatctatcaaattgcagatggcttgtttagattctggtatacatatttgggtaaatatatgagttccattgatcgaggacaaacttcattggtaatgaaagtaatcaaacaagatttacacaatttcatgggaccggaattcgaaaaattggctcaaaattacatgtgggatcatgatgaggatgatgaagttatccctatgccgtttatttatctaggtaattggtggggcaatgatccgcaagagaaaaagcaagtcgaattagatgtagtggggctgactgcagataatctagttggatatttcggtgaatgtaagtggaaaaacgagcctatacctagaagtgtcttggaaaaattaattaatttgagtaatttgattagcgtggctaaaaggcattactatttgttttcaaagtcaggctttacggattcatgtacggagctggcagaacaagtggggtgcaagttgattagttttgatgaaatgtaatatcatttttcctattatttttatctgttgtgatcggagtaagtactggtgtttaaaaaaggcgataatgtggtgttaattctaaagcctaatggcaatcttgaaatgaaaaaagaaaaaactaattttggggacgaagtatcaaaaatgtctgctaaagaaaaaagattgcagattgaagatttgggatatgatccattagaacaaagatcaaaaggtagagaaagaattgaggattaaaagttagaaaaggttcttggaatcttttttgatgaatttaggtaatctaaacaaagaaacggcaccgctagataattagcgatgccgttttagttaggtttagcaataatcaactaagacataataaacatactaacctagcttaggtagctatattattatgcctgcttaatttttttaataaactgcgccgtcgtagaagttgtaacgagggcggttgaagtcgaagtcttttaattcactgatcttaattgcgttatcgcaaacaccccagctcattaagttgattggcttaccataatcttcatcaggaattaccaacaagatgtacttgccttttgaaagggcatagccaagttccattcccagaccaacatcttcttcttcaggcaagtaaacgccaagcatgatgtcgctggacttaatccctactaagtcgttatggtaggtagctgatgcccattcaatgtcgtgcaagtattcaggatgttcatcaacgcggatacccttatattgattatcaagtggtacatagctgttttctaagtcaacggtaggattttgctttagagcttccattgcttctttgtaagccttattttgcttttcgttgaaccaaccggcaccaaagtataaagtttttgtctttgccatatttttctccctttaaaaatgatttaccttaactttaccatcttttgggttgaaaaaaacgtcttgttaacttatggtgaaaatgttaattccacattaggaaggaaaaatccaatgactaatcaaaatctttttgcaccggatgcagtatttatttctaatcaaactaagcaagatttggtttttaaagaagtttacgagcatttacgcgaaagtggctatgttaagggaaactttttacaccatattgtcgaaagagagcataattttccaacgggattggatactgcaacactaggaaaaaatattcctaatattgcgattccgcacaccgagggcgagtttgttaacacgagactgattgttccggttgcgctgaaaacgccagtcacttttcataatatgattaatcctagccaagcaattgaagttaaatttttattcatgcttttagataatgacccagatgggcaagctgcattattagctcaagtgatggattttttggctaatacgccagccaacgaattgcgcgaagtttttaattttactgatcctagcgcgatttatgcctttttagagcaaaaatttagcaagaaaaaagaagactagtttttagccttttttgaaactaagtacgttataatatttttaggacaaagaagaacatagacgtgcatgtagcaggatagctacctgctcaagataggcgcgcgtgtgggctctggcaacagagctcttttttatgcctttttagagcaaaaattcggtaagaaaaaagaagactagtttttagccttctttttctaatcttcaagataaatattacgcaacttcatgatgtctgcacttgagagcttcattacatcgcgtaggtagttattaataccgccatattcatcgtttagtactttaacagcatggtcaaggtattcactgcggacactctgaatgtcacgaatcgattgcagcacattttcatttttaccattttgacgggcatgttcaatcatactgtcgacgaaatccttggtagtgatgttggttaaaagatagtctttcttaatcgtatttagtggtacgccaagagcagataatgcaagtaatgcaccgaagccggttctatccttgcctgcagtacagtggaaaataacactttcgccatccaccgtattttcaagcaagacatcgaaaaacttgcgatatgccttttgtgcaggttcactttcgatcatgtcttcgtaagcataatgcatgtgattgaagccaaaatcagcgtcgtcgtgtgcttgtgtatctaagtcagtgatactcttggatgaattggttaagtcctcactgaagacgggatcatagatatattcaacaccatctggcacgcgatcgggttgattatcaacttcttctttacttctgaagtccacgtcatatttaccgccgtaatcagttaaaaactgcttatcaaatggtgaaagatcagctaagttaccggttctgagcaacttgtgcatcttgatttttttaccggataaagtttcataacctccaagttcacggaagttgcgtccactagttacgccgattaattgattagttaattttttagtcaaaaaaattctcccctttctgttaatgaatgtcatgaatattattttagcaacaaatcttcaagcaaacaatcaattaaaaagtaacggctttcaaaattatgctaaaataaagagtaagtactagtgcaatttataggagatgaattaacgtgacagataaaagaaaagaaagcattttagttccagttgatggctcagaatcagctgaaagagcctttgacaaggctgtaaaagttggtttgcgtgatggtgctcatgttgatgtattgaacgtaatcgatacgcgtcaatttatgggtgaaatgcaagacactttgatttcaggagataccatttaccaaatgactcaagattctgaagaatacttgaagagtttgaagaaatgggctcacgataacttcggttttgacgatgttgattatcacattcgttatggcagtcctaagcggattatttcttacgacttcattaaggaccaccataacaatttgatcgtaatgggtgcaactggtttgaatgccgttgaaagaatgcttatgggttcagttactgaatatgttaaccaacatgcgttggctgatgttttgattgttaagacagatatggctaacaacccagtaaaaccaacgatgaagaagaactaattcctataagaatggacgttagatgtgaatatactcatttaacgtttttttttataaaaattagtcaaaaagcttgatagaatacgaatgcttttggtatcattttataaaatgaacgtggaatgactgaaggagagtgggataaattgcttgcacaagctaaaagaattgaaaacgtttttcttactgtggcaaagtcttcctcccgtgaagatgttttttctgttcgtttatttgataataacgttcttaaaaaggcttaattattggtcgtctttgagcgactcgtaattaagccttttttagcgtcaagtttgtttttgtttattttgtgttttatggaggaatcaatgaaaagatttcgtaaaatcttggtagccgttgtggcaatacttgttgcagttgttgcaactgcatgttcaagtaagagcagtagttcaaaggaaaactacactcctaagtcattaactattcaatttgtaccaagtcaagctgcaactaagttgcaagctcgtgctaagcctcttgaaaagatgctttcaaagagattaggtattcctgttcacgtttcaatgtcaactgactacaacactgttgtagaagctatgaagtcaaagaaggttgatgttggttttcttccaccagatggttatgtattggctcacaagcaaggcgctgctgatttgcttttgcaagctgaacgttggggcgttaaacaaccaggcggtaaggcaactaaggatttagttaagaactatcgtgccgaaatccttgttaagaagggttcaaagattaagtcatggaaggacttgaagggtaagtcaatctcagttcaaaacccaacttcatctgcaggttacgttttcccagttgctgaacttaaggaaaagggcttggatgtaaccaaggactctaagttagttactgtaactggtcatgaccaagctgttttgaacgtattgaacggtgacaccgatgcagcatttgtctttgaagatgcacgtaacactgttttgaaggacaacccaaagattatgagtcaagttgttccaatttacttcactaagccaattccaaacgatactatttcagtaattccaagcatgtctaagtcattccgcaagaagcttgctaaggcatttatcgctgttggtaagtctaaggaaggccgtaaggttattgaaagtgtctacagccacgaaggctatgattacgctaaggacagtgacttcaacattgttcgtaagtatgacaagatggttgaatccactaagaaataataattcaaattaagggagctgcgattaaatggcagataagccaatgatccaattaaaagatgtttctaagatctatgacaatgggactgtcggtttaaaggacatcaatttaacaattaataagggcgaattcgttgtagtagttggtctatcaggtgcaggtaaatcaactctgcttcgctccatcaatcgtttacacaatatcagttcgggcgatattttgattgacggcaagtcaattactcaggcaaaaggtaagaacttgcgtaacttgcgccgtgatatcggaatgattttccagagctttaacttagttaagcgttccagcgttttacgtaatgtattagttggccgcgttgcttattacccaacttggaagaccacgtttaatttatttagcaaagaagataaacaaaaggcctatgaggcattgcaaaaagttgacttggctgacaaggtttatgctcgtgccgatgagttatctggtggtcaacaacaacgtgttgcgattgctcgtgttttgatgcaaaatcctaaaattattttggccgatgaaccaactgcatcacttgatccacaaacatcagtcagagtcatgaatgacttaaagatgttgaacgaaaaatacggcatgactgttgttgccaacttgcacagtatcgaattggctcaacaatttggtgaacgtgtaattggtattcgcgctggtcaagttgtttatgatggtaagatgaaggatactcctaagtctgtcttcactgatatttataatggtggcgacggcagcgaggaggcagaataatgcctaaaacaaaagatgcaatgaatttggtttggaccatcatcatggtcgctggcttgttcatttcaattgatgtaaccaatacgcacatttctgttttattccaaaactgggatcaatttgcggatatttttgtgcaaatgtctcacccagattggggctatatgagtgttatttggcctaagttgattgaaacgattaaaatggctgttttgggaaccgtcattgggtcagtaatcgcatttatttattcattattaattgcacgtaatattgttaaaaacaaggcagtgactggtgtgcttcgttttatcatgaacatcatcagaactattcctgacttgcttttgggtgcgattttcgtagctattgttggtatcggtcctgttgccggtgtcatggctttggcagttttcacctttggtgtggttgttaagctattctacgaagcaattgaaactattgatccaggtccaattgaagctttaactgcagtaggtgctaataaattacaaattattcaccaagcagttttgccacaaatcatgacttacttcatttcatatgttttatatgcattcgaaatcaatgtcagagcatcaacagtccttggttatatcggtgccggtggtattggtttgaacttgcaacagactttgcaggtcttcaactatgctcaaactggtacgatcatcatcgttattatcgtagttgttgtcttaatcgactatgtttcatctaagtcacgggaggcgttaatgagataatggatactactatgaaaaaattacctgctaaacccgttgaccgtaagaagcaagtagtgcattggctgattgcgattgtgacaatcatcattattgtttggtcattcactggcattaactttggtgggatcaaggcaactgctggccagattgcaggagcgattttctcagggattttccatccggattggaaatacgtttacaatggctctggtgaagatctgatctcgcaattatggcaaactatttgtatcgcattcttaggtacatttatttctgcaattatttcattgccatttgccttttgggcagcacacactaagcataagcactggtacacttcaagaattggtaaaattgttttggcaattatccgttctttcccagaaattgttttagccttgatgttcattaaagctgtgggtccaggctctgcagccggtgttttggcattgggtttccactcggtggggatgcttgccaagctgttttcagaggcaattgaaaacttggatgacggaccaaatgaagctgttgttgcagccggtggttctaagtttcatgtggtcatgttctcaactttgcctaacttgatgccagcacttatttcaaatacgctttatcgttttgatgtttccattcgttccgcatctatccttggtttggtaggtgccggtggtatcggttatccattgattattgctttgcaatatcgtcaatgggaccgtgttggtatcattttgctagggatcatcattatggtggtgatcatcgactggatttctggttggatcagaaagaagttagtctaattcccaaaatttgaatattaaagaaagcgaagacgaaaagtccccgcttttttgttagccgtgaaatttaaattggcattgattaagatgatcattaattaatccgattccctgcaagtaggaataaatgactacaggtcccacaaaggaaaaaccatcttttttcatttgtttggatatcttctgcgataggtcattagaagcgggaacgtcatcaaagctggcaatatcatgcacaattggagtaggtacaaaattttgtaaatatttggcgactgaacaatatttttgttcaattgcccaaaatgcccgagcatttttaacagcagcattaattttcattcgattacggataatgcccttgttttgcattaatgactcgatatctttatcggtcatctttgcgacttcagagatctgccaatttttgaatgcagctttaaaattgtcgcgtttatgcaaaactgtggaccagcttaaacctgattggaaaagttcgagcacaagcatttcatacaaatgtgactcatctagattaagtttgcaccattcatgatcgtgatactcctgtactgcttcgtcttttgtatcgccccatggacagcgaataatttcttgattcatatttttctctctttctatgtaagtaatgttttacccctctattatttattacgcaaaaaaatgcgattattttttgagaaattatatttttatgtgcgaaataagggttttaacagctttttttgctataattaggtgtgaatttcgaggaggatcctatggaaaaattagataccatgatgttggctgatgatttagccttatcacaagataaaattttaaatggcgaacaagactttggcgctgaagctgtttacaaagtaatcgataacttgggcgttttaaataacccaatcaaggattacttcgacatgactgaagaacaatattatgaagctgaaagcgatcacaaactaactttgatcaagatggacagtaagttgactgatttgcatgatcgcattttaactaaccatgttgatggttttgttgataaggacgagatcaacttgacctacaatcatgagaatccatatgaagatgatttatacgatccaactactgattatcgtgaaattgtttacagcttgaaagttattggtgcggttcaagcaattgcagctaaggacttgcaagaagtattgtctaaagatgctgtattatcaattggacttgccgcatatgctttagcacacaacgcataaattatttgagtcggctggtaagcggccggcttttttgaggcgaaaagatgaatttgtttaaacacataaagggaatagttgatcgaatcgttggcgccaaaaaacgctctgcaatggataaagatagtgaattgcttgatccgatgcaaaaatatactactgttggagaatatcatgttggtgccgttgatggtacgccgcatggtaaggactatgttttaaccgtttatcaagacgaagacggcgttttgcgacaagcacttagtccagagagtacaacgaaattagcaccggaatatttacgcaagtataatgcggaactaggtcattttcgtgcctttcataataagaagacagggcgccgttattgggtggaaaattacttggataatttcactacggaagtgaaaaagcatattcgcccaggcactaattcggtcaatatcggtgtaattacagatactcactttaaagataaagatagcagcgatttttatggctttaatgggctgcaacatgtgcaagaattttcttatttagatcaatctggcttgctagatttaaaagtccacttaggtgactggatcgatggctccgatgctggcctggtcagtgaaagtgaattggtcaagctgaacaagtcttttaagtcggatcaggtgccatatttgagtatcaagggtaatcatgatgaaaatgataagtttgatgaacatcatgatttaaaagcctcatttccagaaaatgaattcgaaaatattatgtggcccgatatgtaccggcaacgaggaattcattatgtttcgcgccagcacggggtggcatactttgatttagatgacgtgcgggtgatttcagttaatacgtcagatgttccatatgaattaaataaccgcgggcaaaagcgctatgacaataagattgtattggctgtgcgtgaagatcaaattgaggaaattatcgaaattttggctaattcttccaacaaaaagatcatcttcatgtcccatgccaacccaattaatcgaaaggggtctaatgcacttaagtataatggccgctctttgcatgaactgctagttgcctttaatcaacgtgaaaaaggtcgaatgcacgctagcaatggtgttccaacagaatttcgtttatcaaatgattttgattttaccaatatcaagaatgcgagaattattgcctacttctgcggacatcggcatcgtgaagaccagtatcggatcaacgggattcaatatattttgtttaactgttctgccttgatggggccaaatcattcgctaacaactaaatacaacaaaaacttagaccgaagaattgatcaaaataatgaatttgcgggttatattgtgaacgtcgatttaaaacgacaccgcattcaatcctttggctatggtgcagcttctagacgccgggtgtatttcatttagttaaggaatagtaaaggtatttggctattacaagtgtttagcttataataaaaaggttaaagtaaaaaatagtgaatattatagcaaatattaagatttagagaattgacttaggggaatttaaattatgtgcggaattgtcgcgttttatgatccaaagataaatgaaaagcaggctgtcattggcaaaatgatggccacgattaaacaccgcggacctagttccgacgggtattatactaatgacgaggttgcccttggttttagaagattatcaattattgatcttcgtgggggtagccaacctatttataatgaagataaaactagagcaattatttttaatggtgaaatttataactttaagccattaagagaagaattaattaaagcaggccatgattttactactaaggctgatacagaagtcttacttcatggttatgaagaatggggcatggatggcttgcttaagcgtgtacgtgggatgttcgccttcttaatttgggatgacaacaacaagaccctttatggtgcacgtgacttctttggcattaagccaatgtactacagtaatcaaaatggccatttgttggttggttcagaattaaagagctttttggaatttccaaagttcaagcgggaattaaatgttgaagcagttaagccatacttgatgaatcaatacaatgacctagaagaaaccttctttaagggcgtttaccgcttcccagcgggccattggtttgaatacaaagatggtgaaatgaagacccatcaatattgggatgctgaatataaagaaaatagcctttcctttgaagaaactttgcaaaagatcaacgaagatttgaaagaaacggttgatttgtatagaaacgctgatgttaaggttggtgctttcttatcagaaggaatcgactcttcatacttgactagtttgcttaacccagatgacgttttctcagtaagttttgatgattcaacttatgatgaagcttctaaggctaaggcattagcagatattaatcactggaagttcttcagcgataaggttgatgctgatgaagcaatgcgtgacttcccagaaatgcaataccacatggatgaaccagatgctaatccgtcaatcattccactctggtacttgtgtaaactagctcgtaagcatgttactgttgctctttcaggtgaaggcgctgatgaattgtttgctggttatgtgaactacgggatgcatacgcataacgacattattaaggtctttacttcagaattgaaaaagttgcctgagaagaagcgggttaaattggcacacaagattaagagaatgcctaatttcccaggtaaagttcacatgtacaccaatttagctgaaccgagtgaattttatgtcggtcaatcggttatctatgacatggattacccaactatctttacttctaaagatgctaatagcattttacagccaacgtatcgcaataaattgactgttaacggcatttaccaaaaagactttaagaaagtaaagggagtcgataatgttaagcagatgcaatacattgacttgcaccactttatgcttaacgatattgaacaaaaagctgataagatttcgatggcccattcacttgaagttcgtgttccttacctcgacaagaagattgcggaattggctaactctatcccaaccaagtacttggttaaccgtcatgataccaagtatgctttgcgtaaggcttcagaaaaagttttaccagatgagtgggctaagagacctaagcttggcttcccaactccaattaagcaatggttgaaggaaccacgtttttacaaacaagttcatgctctttttgaagaagaatttgtcaacgatatttttgaccaaaagaagattatcaagttacttgacgacaactatgaaggtgatggctcacatagacgtcaaatctgggctatctataccttccttgtttggtacaagttgttctttgttgattacgaaaacacagttaagaaatatcaacacgtgcaacctgaagttgctaagctaatttcacagggtaaattactataattctagggagattttttgaggatgagtaaaaaatttacgccgatcttactcggtagtgatatcaacgtgtatggtatggcacgttcatttaatgaagcatatggcattaaagtgaaggccttagctgacgttcaacttgctgctactcgttattcaagcattgtggacgttgaattgcatcatggctttagtagcgatcctacttttatggacgtgatgcacaaaaagatggaagaatacaagaatcacgaggagccagttatcttgattgcttgtggtgatggctatgctgagttgctttctaagcaccaagatgaattgaaaaaggtctttatcgttccttacataaaatatgacttacttgaaaaattaatctctaaggaaggcttttatgaaattgcggaagaatatggcttgccttatcctaagactaagatcattacgatggatgactacaagtcaggtaagtacgaggatgtcccatttgatttcccagtggaattaaagccggaagatccagtttcatggttgaagtgtcaatttgaaggtcggaagaagacttttgccattcaagataaggctgaatttaaggatatcgtaactaagatttatactcatggctacaacgctgaccttattttgcaagactttattcctggtgatgattctaacatgcggaccttgaatgcttatgttgataagaaccaccaagtaaaaatgatgtgtttagggcacccattattggaagacccaaccccacaatcaattggtaattacatggcgattttgcctgagtacaatgaaaaattgtacgaagaagtacaacaattccttgaaaagttgaactacactggtatggccaactttgatatcaaatatgatccacgtgatggtgaattcaagttcttcgaaatcaacttacgtcagggacgttctagcttctacgtaactttgaacggttacaacttggctaaatggtacattgatgactatgttgaagatgccttgaaagataaggaaacagtttatggtaataagcttgaatctaaatacaagctttggttaggcgtgcctaagaagatattcaataattatgcttatgacaacgactataagacgactgctgacgaacttattcgtgagggccgctatggtactactgtcttttatgacaaggatagaaacttcaagcgctggttattgatgaagtacatgttccataactacttcaaacgttacaagacttactatgaagttaataagggtaagatctttgacgaagaaaataaaaaattaaacaaatagtttaaattgagaggtaaaaaatgcctctctttttttctaaaaaattttagctgaatcatttcccaatttaatggtcttttggttaatacaagatatattcatctatatttgaacacaatacaagatgttgtgttttatgctatgataaagacacgagatttggagtgattgaaatgctaaaagaagaatttaaccaacaaaatgtaacaaaatttaatacgcctaaaacttttgttaaacgtgatgggtcaaagtatccgttcgcaatttttaaactcaacatggttttgcataacctagatttagataatgtagcacctgctgtaattgaaaaaattgtggctaaactagatgctgctgatgaagtaaatgcacaagatgtagcagttgcttttagagatagcctaaatgagttgggttatttggatgaagctaaagcttatgtgcaataccgcaagcacgatgaagaggaatggattaaacaaaccgatactcgtgcacggttaaagcgaatggttaatggtgacccaacgattgttaacgagaatgccaacaaagatagtgaggtcttcagtactcaacgtgatttaactgccgggaccgttggtaaaacagttggtttgaccatgatgcctgagcacattgctaaagcccacttgcgcggtgatattcactggcatgacttggattacacaccactttcaccaatgactaactgctgtttgattgactttaaggatatgctaactaatggcttcaagattggaaatgcctatatgactagtcctaactcaatcaatgtggctacacatcaagttacgcaaattattactaatgtagcttctagtcaatatggtggctgttcttttgatcgagctgatgaagtgttagctccttttgcagagaaaaactaccaaaagcatttaaaggatgctggcaagttcattgatgatcctgaaaagctggaagaatatgctaagagtcaaactaagaaggacatttacgatgccatgcaaggcttggaatatgagattaataccatgttctctagccaagggcaaacgccatttactactttaggttttggtttaggtacttcttggattgaaaaagaaattcaaaaagatatcttgcgtatcagaattaaaggattgggtagagaacgcagaaccgcaattttccctaaattagttttcaccattaagaagggcttgaacttacatccaggggaccctaactacgatgttaaacaactggctattcaatgttcaactaagcggatgtatccagacgttttaatgtatgatacgatcaagaaaattacaggttctttcaaggttccaatgggctgtcgttcattcttacaaggctggaaggatgaaaatggtaaggaagttaactcgggcagaatgaacttgggtgttgtaactgttaacttgccaagaattgccatggagagtcatggcgataagaagttattctgggaaatcttcaatactagaatgcggacttgccaccaagctttagcctttaagggtagacgtgcaattcaagctaagcccgaaaatgcgccaattatgtatcaatatggcgtctttggtaaacgacttaagccaggtgatgatgttaacgagcttttcaaaaatggtcgagctacgatttcgttaggctacatcggtttgtacgaagtagggacagtcttttatggccctgattgggaacacaatgaagaagcacatgattttacaattgagatcgtgaagaaaatgcatgacttgtgtgctaagtgggaaaaagaggacccatatcattggcattacagtttgtactcaactcctagtgaaagtctaactgatcgcttctgccggctcgatacggcaaagtttggcaaggtgaaggacatcactgataaggaatactacactaattcgttccactatgatgttcgtaagcacccaaccccatttgaaaagttgacttttgaagcaccatatccatattatgctgcaggtggttttatccattattgtgagtaccctaacttgaagcaaaatccagcagcccttgaggcagtttgggattgggcttatgacaaggtaggctatctaggaactaatacgccaattgataaatgttataagtgcggttttgctggtgaattcaagtctactgccaagggttttgaatgtcctaagtgtggtaatcatgatcctgctacttgtgattgtgtcaagcgaacttgtggctacttgggcaacccattgaagcggccaatggttcacggtcgtcatgaagaaatcgtgcaccgggttaagcatatggactttggcatggaagatagtttagctaccgaagaagaagtaaaaaaaggtgagtactaatgcctgaaaaagataaaaacactcaagaaggaccagatatccggagtaatttgatcaaggttaatatgggtggggataccatgtttgtggatcctgaccaatataagccacagttagatcaccaacgtgagttaaaaagaatgcaccgcaagccgaaaaatccaaaaccacaagagtggaagactgaggattattctaaacataaaattgcggattataagccatttaactttgttgatggtgaaggcgttagatgtagtctttatgtttcaggctgtttgttcgattgccctggttgctataatttagcagcccaaaactttaattatggttttccatatacgcaagaattggaagaccgcattattaaagacttgggccagccatacgtgcagggattaaccttactaggcggagagccattcttgaatacttgggtttgtttaagaattattaaccgaattcgaaaagaatttggccacagtaaggacatctggtcctggtctggatatacttgggatgaattgcaaaaagaaacacctgataaaaaggaaatgttgtctaagatagatattctagttgatggccgctttatgaatgatttaaaggatttaaccctgcaattcagaggttctagtaaccaacgaattattgatgtgccaaagtcgatgaaggcaggcaaggttgtcatctgggataaattgcaaaaataagataaactaaagtccggaatgattttctggacttttttgctaggtgaaaaaatggaagaaaaaaatattaaacaagttgatcaaatcatgacggccttgacccaagtgattgatccagaattacaagttgatgtagtaaatcttggtctgatttatggcatcgatatcgaaggagataaggcaaccattaagatgactttaacaattatgggttgccctttatctgattatttggaacaacatattcaaaaagctgttctttcagttgctggaattaagtcttgtgacattaagctggtctggtatcccgtctggacgacagagcgtctttctagtgcagctaaaaagcaattaggtgtaactaaccatgatgatcaaattaagcaggagaaagccaccaaagagaagattatcgacttttcagtaccgatcaagaaaatggcagatgaataccctgactttgttcaaattatgtacgattgtggttttactagaattaaaattcctggattgcttaaaacggtggggcgtgtgatgaccattccattgggagctcaggcaatgaaacttgatttggctaaagtgaaaaaagcatttgaagataaaggatacaaggtaatcaatgactgataaaaaaagacaggacgcaatcctgaaaattttgcattatattcaaaacggcggcgattttgcgaccgcaaagaagatgtttcaagaagaattcgatcaggttgatgtggccgaaattacagcggcagagcgcgaattaatcaagcaggggttaaacccagcagagattcaatacctgtgtaatgtgcatgccgatgtctttaagggtaatatcaaggagaatgcggtaaatcctgattttgctactccggggcacccggtgcatacgattaagctggaaaatatggtactgaaatcattggttaatgacgcactcttgccagatttgaaaaagtatcaagcaggtcaagatacactggataaaatcagaaaagaattgagtgatttggcaacaatcgataagcattaccgacgtaaggagacctcgctttttccattaatgaataaatatggcattacagctccgcccgaagtgatgtggggcgttgatgatgatattcgcgatttaattggggatgcaagcaagattgctggtgaggagcatccagataaagatcagttggctgaggcaattaaaaaggcgagtcatgaagtgcttgagatgatctttaaagaggagagcattatgattccgatgattgacgaggtagctgatcaagatgattggtacaacgttaaacgcgaagagagtcagattggctataccctgattcgcaagccaatgaattggaagccaaaggaagctaaaaaagaagcagggcctatttctgttagcaatctttcatccttcctcattaattttgaagaaggaaggttaaatttagagcagttaaatgcaattttggatatgttgccatttgcattgacctttattgatgaacacgataaggtagcttattttggcggcggtgctgagatttatccgcactcgcgcaatgctattggcaatgacgtattctcgtgtcatactgctaaaagtagaccgttaattaaaaagatttttgcgcaatttcattcaggtgaagttgacaagtatgagtttcactttactccacacaagatgaagcgctgcttatacctacgctattatgcagtacgtgataaaaatggaaagtatctgggttgtcttgaggtagcacaagatgtgacagaaattagaagctggactgaagaaaagaaaaaaatttaacttgttgggctgtgttctagtaagggatgcagcttttttctacccaaagtcaagtattatcaatgatttaagaaaataaatttacttgttttaatgatgcgaataaggttaaagcaaataagagtttaaatttaagaaaaagcgaaagtaccacaaataagcctatgaatacttgtagtttttccataggttgcttatacttaagttgattatttgatttcagctaaagtcttttatttttggtggctatgttgtaatcatataattgatcatgtttgataagagcaaacattgtgcgtatcagtttatggactgatgcaatggcgattttcttatagccttggctatttgaagatcgttttttcttgtcataataatcagttatatggcaaggctgcgtagcctttaccgtctccatttgaataataactcgataaagtatttttctggcaatatgattgccatgcttggtaatgccaagagaactgtctttttcaccagattggtaccttcctggatcaatgccaacaaacgcatcaatttgagctgaagtgctaaaccgtcttagatcaccgagctctgctactaatctcactgctgtaattctagcaacccctgggatactcaaatagatggataaagcacgagcgtttactgctttagccagcttttccatgtagttaattacatagtcgcgttcttgctggagtgaaaacaaattagaaatgttcctttgaatagctctaacgataatactatctttggaatcataaggataagcttctctagcaaaagcgtataatcttgtggttaagtaccgtgccctttgttgtcctattccagaaatagaattaagcatttgagttacctgtgtctcattcttttctagaacatatccagcatgtgggaaaagactaacaagcgcccaataaattctgccagatggatgagacagtatttcttcaatttgtgggaaagtggattggaggttgcggtgcaattgatttttagtagtaactatactcctagtaagttcttcataatagcgactggcattctgaagttcatgatactctctgggctgtggatcacgcaacttttgcggggcattaaattgaattaaagccaggcgataagcatctaccttatcagttttattatggcgtaaattattgtccattagctttttcgctttaagcggattaagcttcaaatacttaatatgataatcctctaagaaagcttgcaggcttagagaataaacaccagtagcttcgaaaacaactaaaggagttatcaaatattggttcagttgctcataaagtttttgatagccaaaggaatcattagagattctaaaagattcgccttgtttgatccggtcattaaccacacaaactgtggaagatttactgctaacatcaataccgaaaataatttgtgattccataatataacctccgctgtgaagataaacctctttatcaacctattaattctaattttctaaacacggcatctaagtgcccacagacttcgaagagacttaagaataggtggtaaagcagtccgtttcttttacgacatcaagtgtctaaaaagctgaagacttgatttgctttatcttcactttctattttagacaaaataaaaagtgccagatcgtgaatccgtcgattcatgatccaacactaggttagtatgtttcttttgccctcgtgcaaaaaatcacaattcttgctagactagattgagagaatgattaaaaagaagggaagagagaaaatgcgcacagcacatggaaaacaaccagctgatgaaatcaaattgcattggcttcttctaggccaattactaacgtggttgggttccagctttatttggccatttacttcagtttacctgcacgaccatcttggcgtttcactagctttagtgggtgtcgttttgctgttcaactgtgttgcaaatatgattgggtcatttatttcaggctggtgctatgaccatatggatccatatgtcttgctgattgtgggggctgctttagatgcggctgtcttgtttggcatggctttgaatcatagttggccgttatattggctctggatgactttaactggctttttgggtggctggaatggagcattgattaactcgattgctactagtattaaatctaagccaggtcgttatgtcttcaatatgatctactttgctcaaaatgttggggtcgtttgtgggacattagcagtaggttatctttatgattattcagtgactttattatttgtcattgctggtcttttattcgttggcgtttgcgttaacgcaattattaattatcggccaatgattcagttccacaaggagcgtttggctaacaaaggcgaatcaaagaagaaggcctttgagccgatgccaaaatacaatctgattatgtcaattggcttttttgttacgatcgctgtaatttggttgatgtacatgaactgggaatcaaacttgtctgtctacatggtttctttgggcattccttttcatctgtatagtttgttatggaccatcaatgccggaattattgtcatcgtgcaagctatcttaagtcgttttactatctttaagagcttatttagacaaattttatttggcactttgatgtttgcaatttcttttgttactttgatttttgccaaagattttgcacatttcgccttatccatggttatcttaactttaggcgaagcaaccgcaatgccgtcgattccaacttatgtcaatgatctgtcgcccgattctagtaagggcaagtatcaaggcttaaccttgtctgcatcgtcaattggtcgagctctaggtccattatttggtggtttaatcattgaagatttcggctatattcaattctttgctgttgctgcaattggtatctttttgcttttagtcatgcttattccaatgcatgcgaaactacagaaaaaactaaaattatttgtaaaataaaaacaacctgaattgtcaaattaagtgcaacagttaggttatgaagagatatattgcttgaagagttcctctgctgtgtgatattggaggattcggcgatatttgtggttaatggcatcagttgcctgttgaacataagcttttgacttgtctttcatgctcttgcccttagggaagaattgacgcaaaagaccattgcagttctcattggtgcccctttcccatggagaatatgggtgagcaaagtaaatctggcagcccttgatcttggtcatatccgcaaactcagagccattgtcaaacgtgattgatttaaaccaggcaggatgtctgtcaatctccttttgaagcagcctttggcatgtgcttgcccgatagtcaggaatcttgataactacttcaaagcgtgtggttctttcagtcaaagtcattaaagcaggctgattcttgcgtctgacgcctttaaccagatctccttcccagtgcagcggagcttttctgtcttcaacttaggacgctgttcaatggaattgccaagatgcttcttgtgcaaagcgtgaccgccatggctgtgatgacgcttgttcctgcgtcttttgagcttcataggcagatcaatattgcttatgtccagcaagccctgatcaatatagcgatagacggttggtgtgctgggacaagggtagcctggcatagtccttttgaattcaccaacgaactcatcgatgctggtggcatcaaatttagctttaaagcgtctggagagcattctcaaaaagacagcataatgcttcaatggattgcgctgatagcagtttttgcgacgcttctcataataaatctgtgcagtatcagcgtaatagtgctcatacaataaatagctgctgtctctttgcaggacgcttccgcgtttgatttcgcgactgattgtcgacttatggcagccaacttcttgagcgataacagtacgggaagttatgccggaatccagcattgcttgaatttgtccacgttgtacgctggttaattgatgatagtgcttagaaatgctagaatttgaattggtcatgaagatcttcctttcttgatttttcgtcacttcaagtttaggtcttcatggcctttttgtttaacacttagtgttgcacttcaattttaaatccgggaaaataaaaacaacatgatagcgttaatttttttataatgctatcatgtctttatatgaaaaatttttccactagggaggtaatttaatgtattttaacgtacgcggcggtgctggtgacattactaaggctaatacttcagcgcgtctacaagataatttatatttggccgttaactcagaatggttggaaaaggctaaaattccatctgatcgttcaagaaccagttcatttgatgggatcgatcttaatattgaaaagaacttgatgcaagactttgcagattttgctgctggtaagaaggaactgcctactgtgcctaacttcaagaaggcagttgagctttacaaggttgctaaaaactttgacaagcgaaatgcggatggtgccgcacctattcaggcagatttgcacgaaattttagacttgcgcaacttcgctgactttaacttgaaggcagcagatttttacaagaatggttttgccgttccatttgctttcagtgttgaagcagatatgaagaatactaagattcactcattgaattttggtggtccaagtactttcttgccagatacgactacttacaagactccagctgctgagaagttattggatgttttgaaaaagcaatctattaagttgttaacaatggccggacttgatgaaaaggacgcagaagattacgctgacttggcaattaagtatgacgctaagattgctaaggttgttaagtcaactgaagaatgggcagattacccagcaacttataatccagtttcattgactgactttgaagcaaaattcgattccttcaagatggattacttcttgggcggattatttaccaagaagccagaacggataatttcaactgaaccacgttacttagatcacgcggaagaattgttgaatgaagaaaactttgctgaaattaaggcttggatgctggttaagtttattaatggcgtagcttacagcttgtcacaagatttccgtgaagctgcctttccatttagtcaagctttgtcaggccaacctgagctttcaagtggcgttaagcaggcatatcatattactaatggtgacttcggcgaagtagtaggtgtctactatggtcaaacttactttggcgcagaagctaaagcagacgtgactgatatgattcacaagatgcttgatgtttatgaaaagagaattcgtgaaaattcatggctttctcaagcaactaaggataaggcaatcgttaagttgcgcgctttgatcttgaagatcggttatccagacaagattgaagaaatctatgaccgtttacaagttgatccaactgctagcctttatgaaaatgaagtgcaatttggtcgggaacaaattaagtacaatcttgagaaattgtaccaagatgttgaccgtacggtatggttgatgccaggtgatatggttaatgcatgttacgacccacaaagaaatgatttaactttcccagctgcaattttgcaaaaaccattctatgacttgaaacaaagtcgtgctactaattatggtggaatcggcgttgttattgcacacgaagtatcacatgcctttgacaataacggtgctcaattcgatgagtttggtaacatgaagaattggtggactgatgaagattttgctgaattcaagaagagaacgcaagctgaaatcgacttgtttgatggtattgaatatggccctgtaaccttgaacggtaagcaaatcgtatcagaaaacattgccgatcaaggtggtttgactgctgctgttgaagctaacaagggtgaaggtggcgacaagaaggcaatgcaagaattgtttgaaaactttgctcgtgtttggacaactaagcaattgccagaatcaattaagacgcaagtatctatcgacgttcacgcaccaggtccagaacgtgctaacgtgcaatcacaatgccaagaagaattctataaggcatttgatgtgaccgaaaacgatggcatgtggcttgctcctgaaaagagagtagtaatttggtaagtaacttttcttaatatcgagtatgaaaaattagctaaattacatataagctcctataacaagaatgactacagtgctgctactacactgcagccctttataacttattacccattaataaattttttgcactaaaaagtgtctgggaaaaaactaagtctcagatcatgaaaaaagaacgttgaatttttgtttcaacgctctttttgtatacttttagctccagccttgatattattaaatcatcacaaaataaaaaaggtggaaactaacatgtacaagaattatatcacaggtcaaactgctttaacacttaatctagattttgccattccggccaatcatttggctaatgtcatcagctggtttgtagattcaattccagaagatgttttagtaggcaagactgctaaaacgggccgcccagcctatcatccagccatgatgctcaaaatactgctttttgcttactccagaagagttttttctggcagaaagattgagttgatgctggaagaaaatctgccaatgatgatcttggctgaccagcaaaagatttcatatcatactatcaataattttagatcaagcagccatgccaatgaactgattaaaaagagctttatctacttcactaacctgttagaagatgaaggcttaatcaatgaaggtgctgcttttatcgatggtactaagattgaagctgatgctaaccgctatacatttgtctggcgcaaagcggttgaaaagtatcatgaaaagctgaaaggccaggcagttgaactttatgatgaattgattactaaagaagtagtcaaagaaatggaaaaagaaaaagttcaaactagtcaggggctaaaggaattagctcaagaaactgaagcagaaattaacaagctgactaaagagattgagcaggaaaacaaagccattcctggcggttcacctcgaaaagccaagcgacgtggactaaaaaagattctgcaccggctaagaaaagattatgtgccaagaatgcaaaaatatgaagaagccgaagagatctttgccggacgcaacagttattccaaaacagatcatgacgccacctttatgcatatgaaggaagaccacatgaaaaatggtcaattaaagcctggctacaatattcaagcagtcacgaccgatcaatatgtagttgattatgccatctttcctaatccgacagatttcaaaactttggagccggttttggatcaaatgaccgtgttggacaagtttgacaaaatcgtcgccgatgctggctatggcagtgaatacaattattcgatgctggaggaaaaatatccagacaagaagtactttattccctacactatgtatgaaaaagaacagaccaaaaagtataagaatgatccaactaagctaatcaactggtactacaatgaaaaagatgattattacattgatcatcatggcgtcagattcaatttcaaatattacagccagcgtaaggatcgttctactggtcaggtccgtgattttaaggtttatgaggcagacgagttccagctaacgccagaattggaacaattggctaaaacagctagcggccgccagcgccaagttcgctataatcctaactggcaatatttaaaagaaaaagcaaaagaagttctccaaagcgaagaaggcagacacatctatggcatgagaaaatatgatgtagagccagttttcggacatttgaagaacgtatttggcatgcgcagaacgcacctgcgaggtaaagagaaggtcgaaaccgatatcggaattgcctttatgatgatgaatttgaacaaatattgtcaaagaaggtggctgaagggccgatttttattgttaaaaattttaaagagaacaaaaaaacgatcaagattcttaaaaaaggaaatcttgatcgtttttattcatctggaagctagttttttcccagacactttttagtttagtaattatttagttttagctgtcgagtaatcctttggcttaatccgcttaatgtaagatggatttggtcgacccaggattaatggtacacgctcgattacggtatcggcgtattctaagccgaaccaggaagctgggttagaagacaagttttgcaagcgaacccgcgcttccacaagccatttttcatagccaaccaattgtgtttgtggactgatgacgtcgttaacaataacgaatgagaagtcacctacgtcacgacctgggctggtggtgtattcctgtggttgtggctcaatcgtaccgtcggcgatcaagtcatgaacgatctgacgaatgtagacattcacactagtttgcttcttaaagccgaggtagagctgaatgttaattacgttcttcgtaccgtaagtgttaacagcatattcagcggtaaatggctcgttagtaacattgacagtgacaaaccagtaagcctttgctcgtttaggtcttttatccaaaattgagtacaggatttcacgtttgatgaacttattgtacttaacgttggccatgtaaaccaagttggtagcataagttgggtaattttcatcgtgacttaagttcgttaacatgtcggtatattcatctaagcgaacgtaagcattgcgagcttcacgcttgtcacgaaccttgttgccgtaataccaaacatacattatgaagccgatagcaccagcgatgaagagtgaaacgtaaccaccatgagtaaatttagtcaaacttgaaatcataaacatgatgtcaaggacaccgaagaagatcaagaagatccagttccaaacagtgttgactttcttcattactaaccattcataaagcaggatggtagtcattaacattgaaattgtaatggacagaccataagctgcttccatgtgagctgaagtttggaaatataagacgattgcgatagtagcaacacagatacccttgttaatggaaggaatataaatttgtcctttttcgttagatgggtagttgatgttcattcttggcaagaacttcaagcctgaagcttctgcaactaaagtgaatgaaccggtaattagggcctgagaagcaataacagcagcaatagtagccaaaatgatggcaaacaatctgatgttagctgggatcatttcaaagaatggattgagcacaccgccgtctgcaggacggtaagttgggttgttcaaaatccaaacgccttgaccaaagtagttgagtgacaagcaaacaaaaacaaatggccaagaaccaataatattgcttttaccaacgtgaccaacgtctgaatataaggcttcggcaccagtcgtagctaggaaaattgaccctaaaataaaaattccagccttattatatggactgactaataatctaatagcgtaaattggattgattgcttgcaagattgaccagtcaccgaccatgttcattacgcccattacacccaaaaaagtgaaccaaaggaacatgattgggccgaaggctttaccaatgatactagttcccattttttggatagaaaacagaactagcagaatgactacagtgatggcaataaccatgttttgagtagaaacgggtacattgccgccaaagttcagtcctttcagtccttcaatcgcagttgtaactgtaactgctggagttaaagtaccatcggccaaaatagcggctccaccaattagcgctggtagaactaaccatttagctcgttttctaaccaatgtgtataaggcaaaaatcccaccttctccgtggttagttgccttgagggcaataattacggtttgtaaggtagttagtagcgttacagtccaaagaaccaatgaaattgatccaatgataaagtcacgatttacattaccaatgccgccgttgccttcgacaattgatttcataacataaagcggactagtaccgatatcgccgtaaacaataccgatggcgattagtaagccggccgcgctcatgcgtttagctttattattcattatctcgttatctcccacaacaaaattgtagttttaataaaaaaagaaaatgccacgatgacattttcccttattgtacctattttcgtctatttcgctggacaatgcaagtgagatttgtcagaaattgaatctagaatttggtgatgataaagttaatgcattataataaaaaatatgcagtaaaaaagctcccatacagggagcctttttgatataaattatgaaagtgatgaaggaatcttagtacgttggtcttcgtcccatttttcccatgcttcataagtaagcatttcttctggcttaacaccagtcttttcttccatggccttaagcaagtccttaaagttgtagtcgtggtattgtaacacatgatcaaccaacttcttgcgtgggaagtggatgttgtttaaaacatagcgattgatatcaaccatgttatgattttcatcgtaaaggttgataacttcaagatcgtcttcatcgaattcagcgatgtagaagttagcgaagacctttaagtaatcaggttgttctttgaattcttcctgtggcatagtagtcttgttagcttctggcattacgactttaaagtcgtcgttttcttcattttctttatcagcttgagcttgagcgttcttttcttcttcagtcaaagttgttacccctttatttataaataaatagatacaaagtcaataataattttacagacttctacaaataaaagcaaatagaagtggttgagagatgcaaaagtatagaagtcagttttgattagtaaaatggagtaaaatgaagtaaaatataaatgtaaaaagtaaaatgaagtaaaatgaggaaaaatatgtataatgaaaatccttttgatgctgaatttggcgggatcccagagctatatcttgattttaatgatgatgcagttaaatttgctcaaagagcccatcgtctcaagaaacatccaacttattctctctttattacaggggtacgaggttcaggaaaaacagtttttatgaacaaagtgggtaaagaactaaaaaaatataaagatactatggtagtcactttgcacaattctgatgatctttttcgaatgatgtatatcaagctagtgcctatgctagataaaatcaaaaaatggacgccatcaatttctattaaagttccttttgtatcagtagatttcactgaagcaaatgaaaagcatgatgaaatatattataaagtagaaattaacaagattcttaaagctttgaacaaagtggggattcgtgttgcattttgtattgatgaagtgtcaaatacacccacaattcaaaaattggctgaggaattcaacgactggagcctaaataactatcaagtttcagtgattatgaccggactattaagtgaagtggcggaactatcaggcacacataatttaaccttcttggttcgggcggatagatttcacgtctctaaactatttgcgtcgtcaattgccagaacttacatggatgtattagacataacagctaagcaagcagaaattttggcagatatgtcaaaaggctatgcttatgcatttcaattgatcggagatttgatgtatgaaaatttaagtcaaaagatgacgtttgaaaaagctttggaatatactaaacttagattccgtgatgtacttttcaaccaagcgtatgatgtaattgctcatgaattaacggatgtggattttcaatttttgtacgctatggcgcaagataatagtattagttcaattattaggactatgcaaaaaagtaagcagtatgttaatagctatcgtgcaaaattaattaaatatgatctaattaagccaataattaggggaaaggtcggctttaccttacctttgtttagagatttcattcaagcaaagtatgatgagcttaactggggctagaatttattgaaaaaattcggcagaaaatcacagaaatgaacgcagatccagtttggagggatactattatggactatgagactaagctagctgaagagcgtgaatacggtgaagaaaaaggaattttaagtgcaattaagaaaattatttatcgtaaccggagctatggtgtatcagattccaaaactttggaggatctgacagaagactaccatgattctgtttcccgggatcaaattgaacaaatgatgaaagaagcctaggtctaatgaaaatagccgctgctcaatgtgagtaacggctatttttttacttgttatcatcagcagcagagctggaacttacggcagatgattgatcgttgcttgaggaagccgcgctggattggttgatggatgataatttaagtaattattcttttgaaaaaatatttcttacttgttggagtaaattatcgaattctgttgattcttttatgtggccgattatttttccatgacgggcaatgaaatcatacgatagcatttgaaataataatgcatctccatttgtgtgactagcataatctagcacatagaatctaaatggatcatctgtaatatggttatgagtaattgctagtcctattactaatccagactttttagtgtaagcatgtctgctcactactaaatagcgtctacgaatatttcctttttcagaatcatgtccacccatttcgtgaccagcatgtggttcagcatcgatcattattatgtcaccttgatggacatcaatccttctcatttgctagttcctttccgacaggtttgacttctctaggattgtatcctaattcttggtattctcgctttatttcagtatcataatcataatcgtcataagcggggtctgaccataaatcataattgtttttagcaattcttttgtatacaatatcaccgtttttatttacatcaacagagaattctgtattaagtggaactttgatagtacttggaatggtaagcactattgaatttccttgttttctagccttgactaccataataagccctccttatgctaaaaatattttattatttaagtatatactgtgaatacagtgagcacaaataaaaggagccacaaattggctcctttttcgttgtgtgtcgggcatggcatttgtctagtctagtgaaagtctagatcacgggtagttgtcgccaagtgtagcgaaccacaagccgttagcggtgacgctatgggtgaaggaagtggctagcgagttttccgagcctacgtacagaaacctggtcaggccaaatggtggatgagactgcagcacaagttaaagtccaaaggacaaccgtaaaaccaagacggtaaaccagggggcagtggaaaattaaagatgaatgtcttaccccgagagatctcgtggacaggtgaaaccgagtaagctttaatatcagcgatcgtaagcctggtcgaaaaaggttaatcgcgagaagtcagctgaggtcgtagtagtgctgaaggttttgtaatgaaactggagcgaagggcctaatgtttgtaagagcatatctcgctataagcaatgttcagacagtccggataagaggatagcctagcacaaagagaacgtaactctttgatggtgaaagcaattgggacaattctgaataaatttacaagtagaaatggagatatcacgagatggaactaattgaacagattttaagtcaaaataatctcaaggaagcaatcaggagagtcaaaatcaataagggagcgcctggtgtagacaggagaacagttgatgagcttgatagctattttaaaaagcatcaagtagaaataaaggacgccatcatgaagatgaagtatcgtccgcaagctgttcgcagagtctacattcctaaagctaatggtaagaaacgtcctttaggaatacccacggttgttgaccgagtaatccagcaggctattgcccaagtattaatgaagatctatgatcctcattttagtgagcatagctatggctttagacctggacgcagtgctcatgacgctattgaacaagtcttggaatatttaaacgaaggctatcaatgggttgttgacctggatattgagaaatactttgacacggtaaatcatgataaattaatttcaataattagagagcaagtaaatgacaaaaccaccctccatttaattcgagcctttcttaaagctggagtaatggaagatggttgggttaagcctaataaactaggtgtaccacaaggcggccctctttcaccaattctatccaatatctatttagataaaatggataaagaattggaacaaagaggcctgcgctttgtccgctatgccgatgactgcaatatctttgtcaaaagcggtaaatcagccaaacgtgtgatgaattcaatttcatcatggctagaaagaaagctattcctaaaggtcaacgcaaccaaaaccaaagttgtacgaccaaccaagagcaactttcttggctttaccttctggaaaagtggcgaatactggcaagcaaagccaggagatgaccgcaaaatcaagctttatgacaagatgagagaacttctctgtcgcagaaaagcagctgctcagcctctatcactagtctttactaagataaatcaagtagttagaggctgggtcaattactttagagttggcgacatgaaatattttctaattaagttcagtcaatggctgcgtcataaagtacgggtggtaatcattaaacaatggaaactaccaaaacgaatatacattaacttaatgcggattaacaaggcactaaagtgcaattttagtgatgaagatattcataaagtagctaatacgcgcttaggttggtataaaagaagtacgggtcatgtcattaactttctgcttagcccaaaagtattgggcataagcaaagcggatcgcccaggcttggtcgatccgctagaatattatttatctcgtaaataatcacaaacgtagcgccggatacggaaccgtacgtccggtgcaatgagaggggcgagttataaaactccctctactctattgcttacttgttatcatcagcagcagagctggaacttacggcagatgattgatcgttgcttgaggaagccgcgctggattggctgctggatgattgttcctgctggtgatcgcttgaagaagatgaagaacttgattgatcatctgacttcttgtttgatgagctggacttcttggactgctctttatccttatcagatgaggattttgcagaatcatcctgactagaattatctttgttagaatctgcatcagaattattagatttttgctggtcaggatcagcgttctttttattggaattattataggaagtattattgtgcgtttgagtgttggcatggctaatgtaagcaccggcgccacctccacctaagatgaacatcgcagcaataacaccccaaaagactaatttcttcatattaagacaactctcccttatcttagaaaaaatattaacgaatttgagccaattggtgactttgaatcgttagttatagtgtaagacatctggccggcaggttgattacaaaatactcaattttaactaattattaagaggtagaagaaaaatatgaattacgaattaactgaacaatcaatccaatatgtatttggcaacaagaagtataagaatgggcaaaagacccgcaatttgaagaacgtgaagactggcgctaaggcagatgagttgcaaaaggtgggtcaagcaattgctagtttgcaagaagactcacttgatgaagcatacttagtgcagaagtcacgtcttgtaccagcagctgaataaattaacgaacatatttaggaaataaggagaaaaaatgatggctaaaactactaagactatgaagttaactttcttgaacggagaaaagaagaaaattagtattacgttgggggatgcagtcgataatctaactgcggatcaagtacgcggtgcgatgaatacgattgcggaagccaatgcattcgagaaagacggtgttgcatattatcacactcctcaatcagctgcatacattgaacgcactattactgatatctttaatgattcagcagaatctgcagttgagcctgcagctaagcaagactaatctggacttgcttgaccaactaattagcttggtcaaaaggctcaggagaaaatatcgcaagatgtagagttcacacttagacctttaacagaaatcgtatagtaatattactttttcaattgattttgttacatcgttgtaaaatttaagaaaaagtaaagaaacagtaaagcgggcgcatgctcgctttttcttgttgtgtctaggattacggcattttgttattttagatttgtgtgaatggtattgggatagggaataggtgaattattacaaaagcaagattatagtcaatttaacttgctattttttcaagaggttagtacaatatgaatcgtggtaagtaataggacgtgcttcaggcgtgtcgcctgtacgcatgctgatccttcaacaatgactactacctcatgagagttataaactcatggatcttgctttgaagaattttgtacattataggctccctacatgctgaacctatggcctattacattttttatatttcaaggaggaaaagaccacatgaagaaaaatttaagaattgttagcgctgctgctgctgctttattagctgttgctcctgtcgctgcttcagctgtttctgttaacgctgctgcaaccactaccaacacagtatacactgtaattaatgctgatggtaccgcaatcaacactccagctgatgcaaaatacgatgttgatgtaacacctaaccttactgctattgcagcttctactgtaaatggacaaactattaacggtagcattactggtaacattactgctagttacaatggccaatcatacactggtactttagatactaagaatggtaaagtttctgttattgattcaaagggtagaccagttactcattttggaaagcttgctaatggtttatatactgttactgtaaagggtgtatcattcaactttggtactgctaacgcaaacactcctatcactcttggctcaaagaacagcaatgttgagttctcaactgatgagggtaagagctttgctaacactaaaaaggttgaacttgaccaagatggtactttaaagaatcctatttcaattaaagtttcaaacgttaatgcacttgacctttcaaatgctagcggtattaacttctacaacgcttcaaacggttcacaagtaactaagggttcagttaatgtaactgctggtgttaacggtcgtttgaacgtttcaactgttgctagtgaaatcttaaagaactttgctgcttaccaagtttcaaatggtaaggctgtatcacaaatgccagaccaaaaggctgtagttgctgatgttaatgctgctttaaaggctgctaatattccagttgacaatgctggttggtttgctgctccaacttcattctcagttaatgtaaaggtaacttcatcaattaatggtgttgacgctactttacctgtaaccgttaatgttgctaacggcaaggacactactgtaccaagccaaagcaagactattatgcacaacgcttacttctacgacaagaacgctaagcgtgttggtactgacaagcttacccgttacaagtcagtaactgttgctatgaacactactactatcaacggtaaggcttactacgaagtaatcgaaaacggtaaggctactggcaagttcatcaacgcagacaacattactggtactaagcgtactttgaagcacaacgcatacgtttacaagacttcaaagaagcgtgctaacaaggttaccttgaagaagggtactgaagtaattacttacggtggtacttacacattcaagaacggcaagcaatactacaagatcggtgacaacactgaaaagacttacgtaaaggcttcaaacttttaattaagtctatgtagtagataagataaaacgaggcaatttgcctcgtttttctttttgctctagaaaaaggtaccgcttgttgcgacaccctcggaaaatattattgttataacctagctctgcttcagaaattcttctaactgtttatcagagaacacattgccatacttttgctttaattgttgcaggatttgttggctagtgcagccaacatctttcaaagaagcgactaatgtaagtgcacctgttttaaggcctttcttttcaccaacttgctcgcgttcaagcattctagtttcaaaatccataatagtgtccctccattctggatcggcattcattgattcgatgcgtttttgtgccttatcaaagagtttatcgccatgtaccggtaaatctttcatgagtttgactaaattaagtaatgtttcagtctcggttccatcaggaactccgtttgaattaattataattttagtcaagccatcctgcaatatatctgcatgattgtctacattaatagtttggtatgtagacttgattgcaactttttgcttagttttgaacgtgcaaagaaaaataatgaagacatttttcaaattattgtaagtatagccctggtggagagtatacctttgatcgtttttcgaagcataatagcgcatgcgacgggcaatatcgtcatcgtctgaccgctgcatctcaatattgtaaaggttgccgttaatatcctcaaccaaaatatcgagtcggacatctttttgatcccgatgctcaggatcgatgattacttcttgcttcttaggcggaaagatcttcttaattaggatctccggcagaattccttgcaaaacatgcttgcagaaagctggattggacatgatttcgccaaaaaccttatcttctgaaaaaccaaaccataattctttttgtttgtgcgtatttttcattgcgcacctctttctaaaaaatagtaggataaaatgtaccctctattatttattacacaaaaaatcggcaaaattttttataaaattgtttttttcagcataataatttctagctatacaatcaatgcttcatactgtataatactattcaatatttgaaacaatatagatatattcaaacatagggagtgtgatggatgtgtcagcctacaagcaacgtaacttggggattattagcttgcccactgacataaaatatcgtaattggtccaaggaccttaccaagcggagaattgagaatgactcgcaattagagcaatacatcaagtatgacaataaatatcgactcaataagaacacattggcagtctatgagttcaagcaaaatcctatcttaggcaaatataaggcagtagccttcgacctgaatcgtggaattgtgcttagtcagaagtcaacacatgccatgatgcaaggattgatgcggcatgccgtacattgcgatatgatttggcagagaatgctagctcgcgaggctggagttgatatctatcaagggattgtcatgtacaatgtgctttatttttcaatgcatgcatttagtggaaacttcttcacggactggatttgcttgcactggattaaagacttccacgtcaaacgccatgatcaagctattttcaacagtattgcacttgatgaaaacggcttggtttataattttgcttttgattctcctaagcccaatcttacgaagataattggtcagtatctgtttcataatcattattattctgacttatattatcagcatatgttgcaagaaaataatcttcgcgtaacagccattaattctgattcaatcctgcataattctaactattatgtgcaactggacttgtacgctattgatagttttaaaaagctggcagacaaattctacaatcatgttttgaacttacacctacttacgattgtgaaagaatttaagccattagattatttgcaccgtgaacaccgcttttttactaagcagattattaagatcagatataatcgttaacagctctcatgagctgtatttttttgcacttttttgactatcatctgttcttcgtcaggtactatctgacttgactttgcttatcgtagaaattaacaaacacatgcgacacttgggattagagcatctcaccactaagtttttttgcagatccaatcttgctaatctaatagtgcacaagcgcttgtgacatcatttaggagagtgtcacaatgacaagtcaaaaatatttcgaagaagcatggaaaaatcgtaagttagttggtggtgccttaaaggcggcacatgttcgaccggactatcatctctatgaagatctgttgcaagaaggtgtaattttgtatgccgagatgttgcgcaaattagatgggcaaaaggttcgcagtgagattgataagcttagcttcaaaaaggttctttggcaaacaatcgatgctctgcgccgagagcaacgcgtatgtgaacgcaatactgcaattgacgaggcttatgacttaggtaaaacagaggcatgggataatcttgtagctttaaaggatgaagttaacaaactaagtcaacttgagcaagtaattctttttgagcatttgcttgagaaaaagacaattacgcagctagttaaagaatgcggtataccgcgtattacgttgaaacgattgaaaaagcagcttttaggtaaattacgtaatgtgatggaacaataagttcattttgtaacaaaatttaatttcataaaaaattttacctactttttgcgtaataagtagtagagggtaattttgctgaagcaataattgaaatgaggtaaaatatgattaaaataaaaagtcgatatccgagaagcactgacgatttggtctttggtcacgtcatgagcaataagaagaattgaatttcagactggtacgcacgttaaagttttcaattctaagggcaataatcatgacctgaaccaaaagataattgacttcttggattacatgaatggaatcatcaatcaccctgaaggttacatcgccagcttgcaaaaggatgtcgaccattacgtgaatagcggaaagtgggtcgaagatatggacaagttggaatatgaaatgaatgaagtcgctaggaaagtaaaaatagaagatgctaagaagctagtcctagtcattaaacgaatgggtggtactaaagacactgccttacaagaactcacaaacaattacggcgatatgcttagccatgatgaaattatcaaactagtacatgaagtttatcagtaaacagtaatcaataatctacagtaaaattatctttcaaaggtgtcgcaacagcgatgccttttttagagcaaaagaaaaagttcccccaattttatgttttataaaaaaaacagtatctatgctaattatggttctcaaattgaaaaatggataatttgatgttggaacaattgatggtattcaagttaaatactgcttgattggttgttagaagagtaaaaaagccatttcagtcacatttttgctgaaatggctttttctattttccatcttttaattatattatcttgaaatgacctcttcttatcctgaagtgtagtctaccaaaaatgtcagagattatttcgttccttctcgtagagtaaattattatcctaaattctattctcgttaatcatgctatcaggcaatataattttcattcgatcatcgaacatattgaagtttacctcagagccttgaatctgataatcataatgaatcaatgcattaactaaaacctctcgaataaccttaaatggtttaaatatttttatattgcacctgtatcataatgataaaaaagttaacgaatgcaactcgttagctctagtcgtagtctaagataactattagcttaatttttaagagcaaaagaaaaacgaggcaattgcctcgttttaaattattttctctttttagtatgtttgacagttttcttatgtgcctttttgtgattcttcttatgagctactttattatgtttcttcttggtaactttcttcttgctttatagtatttccagtaatattacccaaactagtatgacttaatcgaccattcttgaccgcaaaatcaaattcaagattaccttgtgcaagagtactgtgtgcattaacactagcagaaccaataatttcaccattgttattaacaatagtaactgaacgatcagttgaagttggcgtcaaacccattattgttacttgtgcatttaaagtatatttaccattgtttaaaactgcatcgtttgtttcaatttcagtaccagtattattagtcaaatggatgttattaattgaggtagaagcactaattctagtgctgtttgtgtatacacttctatcacgaagatagtgagtgacaacactacttttagttacaactgcagctgcttgaatagtatttggggcagctaccaatgaaactacaggcgatgcagcgaacaaagccgccgctacaatactagtaaatttaaaattctttttcattattatttcctccaaaaaagtgtctgggaaaaaactaagtctcagatcatgaaaaaagaacgttgaatttttgtttcaacgctctttttgtatacttttagctccagccttgatattattaaatcatcacaaaataaaaaaggtggaaactaacatgtacaagaattatatcacaggtcaaactgctttaacacttaatctagattttgccattccggccaatcatttggctaatgtcatcagctggtttgtagattcaattccagaagatgttttagtaggcaagactgctaaaacgggccgcccagcctatcatccagccatgatgctcaaaatactgctttttgcttactccagaagagttttttctggcagaaagattgagttgatgctggaagaaaatctgccaatgatgatcttggctgaccagcaaaagatttcatatcatactatcaataattttagatcaagcagccatgccaatgaactgattaaaaagagctttatctacttcactaacctgttagaagatgaaggcttaatcaatgaaggtgctgcttttatcgatggtactaagattgaagctgatgctaaccgctatacatttgtctggcgcaaagcggttgaaaagtatcatgaaaagctgaaaggccaggcagttgaactttatgatgaattgattactaaagaagtagtcaaagaaatggaaaaagaaaaagttcaaactagtcaggggctaaaggaattagctcaagaaactgaagcagaaattaacaagctgactaaagagattgagcaggaaaacaaagccattcctggcggttcacctcgaaaagccaagcgacgtggactaaaaaagattctgcaccggctaagaaaagattatgtgccaagaatgcaaaaatatgaagaagccgaagagatctttgccggacgcaacagttattccaaaacagatcatgacgccacctttatgcatatgaaggaagaccacatgaaaaatggtcaattaaagcctggctacaatattcaagcagtcacgaccgatcaatatgtagttgattatgccatctttcctaatccgacagatttcaaaactttggagccggttttggatcaaatgaccgtgttggacaagtttgacaaaatcgtcgccgatgctggctatggcagtgaatacaattattcgatgctggaggaaaaatatccagacaagaagtactttattccctacactatgtatgaaaaagaacagaccaaaaagtataagaatgatccaactaagctaatcaactggtactacaatgaaaaagatgattattacattgatcatcatggcgtcagattcaatttcaaatattacagccagcgcaaggatcgttctactggtcaggtccgtgattttaaggtttatgaggcagacgagttccagctaacgccagaattggaacaattggctaaaacagctagcggccgccagcgccaagttcgctataatcctaactggcaatatttaaaagaaaaagcaaaagaagttctccaaagcgaagaaggcagacacatctatggcatgagaaaatatgatgtagagccagttttcggacatttgaagaacgtatttggcatgcgcagaacgcacctgcgaggtaaagagaaggtcgaaaccgatatcggaattgcctttatgatgatgaatttgaacaaatattgtcaaagaaggtggctgaagggccgatttttattgttaaaaattttaaagagaacaaaaaaacgatcaagattcttaaaaaaggaaatcttgatcgtttttattcatctggaagctagttttttcccagacacttcttatttgtcagcgtataccacagacttaattaaaagtttgaagcctttacgtaagtcttttcagtgttgtcaccgatcttgtagtattgcttgccgttcttgaatgtgtaagtaccaccgtaagtaattacttcagtacccttcttcaaggtaaccttgttagcacgcttctttgaagtcttgtaaacgtatgcgttgtgcttcaaagtacgcttagtaccagtaatgttgtctgcgttgatgaacttgccagtagccttaccgttttcgattacttcgtagtaagccttaccgttgatagtagtagtgttcatagcaacagttactgacttgtaacgggtaagcttgtcagtaccaacacgcttagcgttcttgtcgtagaagtaagcgttgtgcataatagtcttgctttggctagcaacagtagtatctggcttagtagcagttaagtctgaactcttaacgaattcgtttgagccgtccttgttgatacgagtgtattcaacaccgttaacagttaccttaccgaatgtgtaaacagctgcgccctttgcaagagctggaatattagcagcttctgaaacaacattaccgttaatgttgtaaactttagtattatcagcctttacgtattcttgtggtgccttttcagtaggacccattacaattgcgtaaacagtaagctttgaagtaaagccagctggattagtagcagtaatagttactgggtacaaacctgcaacacttgggttaaccttgcttgagtcaatcttaatattgcttgagttgatcaattgttggtgagcagctaattctgctggagtcttgtcgaagccagtaccataggcactttgtacgtaagctttaacagcaccagttacagcatcgttgttaaatttaccatttacaataactttggtcttgtcagtgtccttaagtactaagttacctgaagttttaccatttgacataacgttgtcattgtagtaaacgttgccgtcaaatacaaatgcaggtgcattgtagtttactgatgcattaattcttacagtaattgtagttgaattaccattttctgacttagcagtcaacttaaggttgaaaccgtttgctggataatcaaagttaccgtttgaagcacgcttcaagccttgagctactaattgactttctacatctgaagcggtagtagtcatattaatagtgtcatttgattgatcactggtcttccaagcatagtgcttttgaatagcattcaaaagatctgatgaactaaagccgttagcaatttcgtttaatgaaacagtgctaccatcgtttacaacagtgttagtatccttgttgtagaagtaaggagtaccttgttggctagcgaacttagcatttaaagtaacttggtaagctctgtcattaacagtgaatgtaacaacttgttggaattcaccatttgagtttgaagcagatgctgacttaacagtaatattcttcatatcttctggcttagcatcctttaatgcatcgccacctaattgtaagatagcatccttttgagcatcgctcaatttgatactgaattgagtatttgaagcacggtcaagaacaatggtgcctcttaatgtaccaaggtcagtaacttcttgagaagtagcagctgaaacagtagaagcaggtgcaacagtgttggtagtggttgcagcagcgttaacagaaacagctgaagcagcgacaggagcaacaggagcaacagctaataaagcagcagcagcagcgctaacaattcttaaatttttcttcatgtggtcttttcctccttgaaatataaaaaatgtaataggccataggttcagcatgtagggagcctataatgtacaaaattcttcaaagcaagatccatgagtttataactctcatgaggtagtagtcattgttgaaggatcagcatgcgtacaggcgacacgcctgaagcacgtatattgtgtactcgatttttgtcaagcaatgaaagggtggtttctgtcctcttatttgcttggggtcggttgggtggtttttgtccgctgcgcagatacttttatgaaaaaagagtacgatgcgatttgatgatttagagtgtcatttttggttttgttaagggatgcttgtaaaataataaggtaaagaaaatctaaagaagtaattttgtgaaaaagaaatcgacattttttgcgtacttatatattgtcaaaattaagatatgtaggtgataactatgttaaataaaaaggataaaactaaaattcaagaattaactgataaaacagtggacttgatcgtagaaaatatggggaaatcgcgtaaagaagcggaacaagattttcaaaagtcagatacatatgcgttcttatggctagcgaagcgtaatatcgaaaatgcgcaccctattattttgtacagaatgtttaattctgagttaaaagctaaaccaatagacgaagaacaacaaagttttattgactttatgactgataacacaatcgagttaattacacagaatactaatttgggaagataaaaggcaactaaagttttcaaatctacaaaggtatattggatactagttcactcaggacataatttagatgaatcttctcccgaagagctgtttgatatgtttagaaatgaacttagtataggtaatccactaccttcatctatgctgaagttaacttattaaaaaatttatataagttaaataatattattacaaatgttacttttttacgacaaatctgttgaaacgcttgtctagacctaatttgatagatacaatggaggtgttatattaaggaggataattttttatgaagaagagacttttgaccagttttgctgctgccgcaatgcttacttctgtagctgtgccagcagtaaatactacgatgatgaatcaagcctcaagccaacgagtttctgccgctaccgctgatcaaactgcatttttaaacaaggctgccaagcaggcagttaaagcagctaaaaaatatggaactttgccatcagtgatgattgcccaggcaataactgagtcaggctggggaaagtcaggattagccgtgaatgctaataacctttttgggatgaaggctgatgattcttggacaggtgagacttatactgccaagactagagaagaagataaaaacggtaagagctactatattactgctaagtttagaaaatacccatcttttgaacaatcatttgaagataatgggagtaagttgagaaatggtgtttcttgggatccgttgcgttataagggcacttggattgaaaatgcatcaacttatgcagctgcaaccaaggctttgaccggtacgtatgctacagactctaagtatgataaggcattaaatagtcatattactagttctaatttgactaagtatgatccagtaaccgttaatactactagaacttatactgctggcaaggatagttcaacttataattggccaactgctccatctgttgccagtgttattggctctgttaaagctggtgaaaaagtagtagttaccaagactattactttccatgatggttcaagcagaatgtatattgatggtcgcggttgggttaatggctcagttttggacaagagcagttccgcaactaaggaaccagtaactcaggcacctaagaatgtgccagctgtttctaagaacttgatgcataatgcctatgtttatgaccaaaatggtaagaagctaaagggcaagatgtacaagaccagtgatgaaaacggtggtaagtggatcaatacttatggtaccaagaccatcaagggtaagacctactaccgtgtcggtgaaaatgaatacattgcagctggtaatattgatggtagcctcagattcttgaagaagaatgcttatgtttacaatcaatatggcaatcgcgataacaatttgaagcacaagaagaatagccaaattgctacttacggcagtgctataactatcaatggtaagaaatactataaggtaggtattcgtcaatacgttaagaaatcgaacttcatgtaattaaggaaagggctttgttgtgaagatacgcaaatttttaattgccttaattgcgcttttggggttagtcggcgtatcatcggtcagtaaccaggtcaaagccgcttcgattaatactttagcgaagaaatatcaatatagtggtgtcacctatttatacaagatgctcaaactagaggggattaagtacaataaattccctggtgttgagtatcaaaatggcaagccagaaggaattgtcgttcatgagactgacgatcccggagctactgctcacgatgaagcaatctactttaaccgcgagtggaaaaatatcaacgcttacgtcaatgcttttgtagatagtaagcaagtcatccaaatgtattcacctaataatggtacttggggcgcaggaccgaatgccaacaatcgctttattcaaattgagctttgtgaagaagatagtcgtgatgcctttgctaagtcagttaataatgatgcaatttatattgccaagttgcttcatcgttacaatttaaagccagacaatgcttgcgatgatggtgaaggcacaatttggtcacacaaggcggttagcaccttcttaggtggaacagaccacgttgaccctgatagttattttgccaagtgggattacgacatggatcagttttattctttgatcgagtattactatgacttgcaaaagaagaatgaaaatactgatactaaggatccaaataagattaaggacgaagtaccagcagaagttcaaggtgcggtaactttaggtcacgatgcttatgtttatgacaagaacggcaagaagaccaagatcttgaagttagctggtagtccggtaaccgttttaggctacaagataatcagtaataagaagtactatcaaattggaaagaacgaatacgtagtagctactaatattgatgctactgctagaactgttaagaagaatacatatttgcggactcgttcaggtcgaattgaaaaaggtaatttggtcaagaagggtagtcgggtcatgacatatggcagcaagattacaattaaaggtcaaaagtattatgctttaaatgctacacaatatgttttagctagcgatattaattagaaaaatacgtcttaaaccataaataatgggaattaagacgtattttttgtataattcttgtgttgaatgtgaaaaggggagaatttaatggcgcaattatcattatttttggtcgtcttattagcgctcgtaattccaatatttatggcgcgtttcaaaataagcactgtaccaacggcgattgctgaaattatcgtcggaattattgtaggttcgagcggatttaatatcgtggtttcgatacatgatttaacatttttatcgaacctcggcgtaattttgctgatgtttttatcaggaatggaaattaattttgacctgctacagcgcaagaataatcctaaggctaaatcacaggcgggaaaaactgtcgatccgttgccaacagctttaacagctttcgctggaattgtggtaatggcctttgttttggcatatgttttaaagctgatagggctatttagcaatgttatcttggcagcgattatttttatgaccattgcattgggtgtagttattgctaccttgaaggaaaaggatattcttggccgaccgattggtcagacaattttgttaactgcggttttgggcgaagtaataccgttgctcttattaacgatttatgcctcagttaatggagggaatgctggccagctttggttgattatcttactgtttatcgctgcgattattcttttgcggcggtttaagcaaccgtatttatggtttagcaaagtaactaaggcaacgactcaattggatattcggttagccttcttcttgatttttgctttagttactgtagctgagcgagttggtgctgaaaatattttgggagcattcttggccgggatggtaatgaaattattggaaccaagcgaggcaactaaagataagctaacttcaatcggttatgggttctttatcccaatcttttttattatgactggcgtgggcttgaatttaaagtcactatttgctcatccatcatcattgatgttgttgccagttttggtcattttcttgttcttagctaaagctcctgtagtttttctttatatgcgctattttgaaaagaaaaatgcctttgctggtggctttttaactgctactacaattacgattgttttgccaactctacaagttgctagaaaattgcatgcaattacttcaacacaatcagatgcctttatcttagctgcggttattgtttgtatcgtgagtccgattgtctttaattcaaactttgttttatcacctgaggatcggatgaaagaaactgttactattgtgggtgccaatacttttacggtaccagttgcacatgatttgcatgataattggtatacgatcaagatgtttaccgatcagcaggaccaatacgaaacttatgatagtagggttaaaggtttaacattacttgataatttggataatcaaagcttagagcgtagtggtgcctttgattgcgacattttcgtagctgcagggcatcatgatcaagaaaatgcacgaatggcggaatatgccaaagacttgggagtcaaacgagcaattgcccgaatgaatgaagtcgatagcaatacgatggctcgatgccaggaggcaggagtagagttgttcaactttactaatgtacgttctgctctgatgcgagctttgattgagtctccaacggtctacaagattatgactgatactaacaatgtgttgtactcagttaaggtgagaagtacttcctatactggacgaccacttagggatctggaatttgtggacaagattacggttagtcgaattcggcgtggtgatgagtggttaataccacacggttggactgttattgagccgaatgatatcttgatcttttctggagaatttaaggttgctgatcgagtaaagaagttacttagtcatcaaaattagagataaaaagaggctaaatgcaaaaatcctgcatttaacctcttttttacgtaattaatgattttgtccttcaactgcttcaatgtcgccttgtccatcgcgctcaacaatagccccaattgcagcgattaagcctttaacaatatcggctaatgccattgatggagtgcttggtcttttgacaacttgttctggcaaaaatgggatgtgaatgaagccagctttaaggctagggaattctttagctcgcatgtattgcacttgataaaagatgtggttgcagacgtaagtaccggcagtgttggaaactgtagcaggtagaccaacagcgcgaatcgccttagccattgccttgattggtagttgggtgaagtaagccgtgtcgccatcggcttggataggttcaccgagcggttgataaccatcgttgtcggggatgcgaccatcgttaatattaatagctactcgttctggggttaaagcagcacgcccaccagcttgaccaacattaagtacataatctggtttttcttgcacgatggcatcatgaacaacttgggcagatttattgaaaaccgtaggaatttctaatttgataatttttgcacccttgattgagtcaggtagttttttgactgcttcaatggcggggttgatcttgtcgccaccaaaaggatcaaaaccagttactaaaattttcaatggcttttcctccaaatttaaatcatagaattttttgctttagtcaaaatttgcattgtctctaaagtattgacaaatgcttcatccgctttttgcgtatcgtgttgatcaatcatctgggcaaaagtattaaattcagctgccattcggtgcggatatttatttaaattataacgcttaggttgctcatttctcatttcaactgtgaaattatcaagtgttcccgttgagccgtcaaaatagatactacctttttcaccttcgataaaagaacgtggcgttacatagctatcttttgatgccgtgagggaggcttgtttgtcaggataagagaggtgaagaataccagaagtatcaacgcctttttgcatgttggcataatattgcacttgatcaggcaagccaaacaatgccgagacaagatgaatgttgtagatatttaaatccattaaagcaccgccatcttttttaggatcaaaaaccggcgcaattttgccttcaagaaaggcgtcatagcggctagaatattgcgtataatttaggttaacaatatgaattggtgcgatcttgttcaattctttttggatttgtttgaagttttctaaataaaggttagtaattgcttcaacgatgatcaaacccttttcgtcggctaacttttttaattcttttgcttgagtggtgctctgaacaaatggcttttcacagattacatttttatcgtgttctagagcagctttagcaatctcataatgcaagaagtttggcaccgctacataaactgtatcgacttcagaatcagccattaattcttcattgtccgtataagtacgtttgatgttgtactttttagctaattcccgggcaatattttcactgcgcttagttgaggaaatagccgttacagtcatattcgcaacttgatcagcggttgttaaaaagtcatggacgatcatgccgctgccaataattcctaatttcatttttttgcctacttctttttagtattagtggttggtaaatctttagcgttagttgcagagtctggtactcttaagaagtcatggctgccgaagttgccataactttgaccaactttaacgtacattaatttacctagtttcatattaacaaagacattaaaggtagataatttattacctttaattacagccttaacattcattgattggtacttgcctaattttttaatttggctgaaaattttagcttgatttgtactttgagcagtagtgtcaaaaattggtgctgctgcctttttcatcaaagcttggtcagtacttttagcagttaaagtataagtgtaaacaccatcttttttgctttttttcattttataagcagaaaccaacttatcacttggattggtgatcatgtggttattcatgatggcatcggttaagtcggcataattatgaccggttagtttttcaaggtcagccttgtaccaagtatcttgtccattaatgtagacattgttaaggttgacccattcctcagtagaactagttttacctttgctagtggtttgattggtgatgtggtaaacagtggttttaccaccaaaggtagtgttagctaaggcaacttgattagaagtgtcggtacccagagtaacagattgaataacctgtcccgacttgaagctacttttagctttttgtacaacttgagtcttagtcagagctgaagtagccttcttctcttgtttactgcagccacctaataaaaagaggacagcaaaggataaaccgataatcgttttcttaagtttcatttttttctcctctatgcttcaataagtctattataactaaaaagtccgttgctcgttggagttacggactattcttttactttattttgtattaattttgcctaaatctacggccgatttcttgatagaagcaggtaccgtcaactttttgacttgattaatttgatcaatctgcatggtgaaattctttttgtgtccttcatccttataagtagaagtcacattaacatttttgatgtcgtaattctgatctacgttaattttgatttcgttgctaattggtttaacatcatcaagatcgatgccgattaaagcagtaaaggcagaatcagatacaattgcgttccaaatttttttgttatttcctttataagtaagcagataatcattgccgttttgctttaccttaaaatattttgcgttagggatgaaaggcatgagtaatgtgccgttcaaattgtcggtaatggcaccataggcactagccttagacaactttgtcttaaaccaacgctgagaattggtacctttcatttggatatagttgcttttaccctcaatccacattttatagtgattagagctgctagaaacattagcataaataatcgttggctttttagtatattgggcttcggctttttgcaaagacttgccattgcttaattcattccaagtagcgtgcattgaactgaatttcgttttttctgcactggttaaaatcgtcttggcagtaggtaaattagctgtcttttttgaacctgtcttagagcaggccgttaaaaagagtaatgctaataaaacggtaatgataatattttgatgtttaaatttcatacataactttctttcattaaattttttcttctagtatagcaagaataacgttacaaaattgaaaaaacacgatttttttagtcttaactctatgaaaaaatttgtgaaatgtgtaaaatatggatgaaacattgaattttaaaaggagatatttcatgtcaaaattagttttaatccgtcacggtcaaagtgaatggaacctttcaaaccaatttactggttgggttgacgttaacctttcagaaaaaggtgttgaagaagctaagaaggctggccgtttaatcaaggaacacggtcttgaatttgaccaagcttacacttcattattaactcgtgctatcaagactttgcactttgcacttgaagaaagtggccaactttggattccagaaactaagacctggagacttaacgaacgtcactacggtgctttacaaggtttgaacaagaaggctactgctgaaaagtacggcgatgaacaagttcacatttggcgtcgttcatacgatgttttgccaccagctattgatgatgacaacgaattcagtcaagcacatgaccgtcgttacgcaaacttggacccacacatcgttcctaaggctgaaaacttacacgtatgtcttgatcgtgtaatgccattctgggaagaccacattgctccagatttacttgacggcaagaacgtaattatcgcagctcacggtaactcacttcgtgctttgactaagtacatcgaaaacatttctgatgaagacattatgaacttggaaatgaagaccggtgaaccagttgtttacacattcgacgaaaacttggatgttgttaacaaggaaaagttggacgactaatttattaagtagttattcacacaaatagaacttcggcgtaagtcggagtttttttatacaccaaaaaaggcatcaccgttaagggatgccttctttgtatcaacttgctccaaaaactataattatttctttgatttcataatttttttggaacaacttcattatattataaataaagaaagatcgccatttttttctaagaaagtggtgaaaattgacagttgtatatgataagtgctattttgagttacaggagtgtagaaattgggagaaaaatatgcaaacaatcgataattctctctttcaagtctctgtcgatgagaatggggcccggatggcacatctggtgtctttaacagatcaatttgattatctcggcgagcaagaaagtgaagaaggtatggcacttgcttttccagtaatggatcaagccgataatttggctaacaagttgccttggaccgttgttgacaaaggtgatactcgcgtaagtctaactttaattgatacgccggagagctataagagttttccatatcattttgaagtaatgactacttatgctttggagggtaatcaagtcaatatatccttttatttaaaaaattcttcaaataaggaactgccattttctttgggctttatcttaccaacttcttggcaaagtgaaagccaggtcaataagattagtttgactggcaaagaacatggcattgatcttacttcaactgattttaagttgagtgcaaaagaaggaagcgttacagcttttacggataaaattgaattagaggcaaaaagtagccgtaattttgcgttaagcttgactttgaagtaaaaattagtaacgattttaataagatatactaagcaagtcagcgatgatttgctttttttgttataatacattcaatgtgaatttacatcataataggtatattttatgaaagatagaaaacaaagatctaatcacccgcataatagtcgggtagacacacacagttataaaaatcgtcatatttgggtctgggttattagtatcgtagccttgcttgcggttgctggagcggcgtactttgcatcagtttatttccgtactaagtcagcggttgataagacctatgatcctaagactgcagtgaaaactacaggtgaatttgatggaaagaagaagttcgctgttttactgatggggactgatacaggtgcccttgatcgaactgaaaagcgcggccggactgataccatgattttagctgtagttaaccctgctaagaagcgttacacattggtctcaacaccgcgtgatacgatggcacagatggttggaagcgagagcttcaagacagaaaagattaacgccgcttatgaattaggcggggctaagatgtcaatggattcagtttctaagttaatcaatgtgccaatcaagtattatgccgtggttaacatgggtggaatcatgaagatgattcgctatgttggcggaattaatattagaccaacgcttagctttgaatatggcggttatatttttaaaaagggcaagctgacccatatgggtggtgcaggtgcgctagcatattctagaatgcgttatgatgatccgcgtggagattatggtcgtcaagaacgacaacggcaggtaattaccaccttgatcaagaaggcagtttcaattagttcattatcaaatctggattcaattttgacttctgtgtcaagcaatgttcggactaacttgccatttagtgcgatgcagcagattgcgatgaattatcgtagttgtgccaattcgtcatctagtgattatctacatggttacaatgcaatgatcgacgatgcggcttatcaagtacagccaactagtgaattgcaacggatttctaacctggtgcgcaaagaattagggttacctaaggaaacggtttcaaataatgaaactttccaaaacgaaaagaatattgcaaatggctttagctttaagagcgaaaaaacgcagcactatcatatctatgattacaccgaagaaggtgataattaatggcgcgcatttgggctactctgattggctacgtttttggaaatttcttaacggcgatgatcgttggcaaaatctttttaaaaataaatcctactgaatacggttcacataatccaggaacggctaacatgggtgctgtttttggtaaaaaatggggtattttaacctgtttaggcgatttgcttaaaagtttaattgccttgtttattgtatattttgcttttccagctcatattaatattgcttatacagggctaggcctgatcttaggacattgttttccaatctgggatcattttcgaggtggcaaaggagttgcggttgcagctcaggtagcagttttttataattggaaagctggctttgctactttattagtggctttggtattaacagcaattatgcaaaatttgacgattccgcctttagtgtttatgcttttattcagtataaatacattcttgcataatcaagaagcaggatttgtttttatcgtgattactttgatcatgtgctttaagttctggcatgatatcgtagactttttcaccggtcatggcaaaaaggttgatattctgctttcaattaaaaagaagctagggatcattaagtaatgacagaaatttttagtgaggacacagactagagaaaatgagtgagattaacaagaaaaaatcactaaatgctcttcaaatcatttgtttgattgtcgcagcattctttatgctagtgcagatgtattcttggggtagcacttttggtagattaccattaagtaccctaatgagatttattccaggactacttggtcacagtacgatggtactagtaccaatggtctttggtgctgtttatagcaaaagaaaggttcatccaactgaagcctttaagttttggattatagcggttgttacactagtgcttttatacttggtgaacttctttaaacgaccaggtacctttaatatgtggaagctctggggagtatttttcccagttttgactagtacatcagtattgttggctggcttgatttttagtatgctagttcaaccatacttgtatgaattacaacatcgcattactactaagcaaaatgtattattgcttagcgcattaactttgactggttttgcgactagtgcaggtacaatgatctttaacaagtcaatttatggcatttatttgatcttgtactttgcttgggggatgtttttagctaacgttaaaattcctaaaaaggtctttggctggtcaattgcagctggagtaatgtctttcttcgtaatgtttatcggtattcccggatttaatggggtttactggtaccaacgattatctggtcgaagtggcgtttattcctggaatcctaaatttttaagtaatattgcttcaccatttttgttcttaatggttttagcagccttcttaatctttagaaaagtgattgttagctatagtgctaagcagatgcacttctttattccagtaattatttttatggacgctccaattattggtggttttgttaaatcgttccgctttaccaatagcgctggatttaacaagttcttgatgattgtcatcatgatgctagctgcctggggcttaagctggctatatgagcgctatttattcaaggtgaagccggttaaacggacggttgcttttttcaagcaacataataacttagcagaaattgttgaagatgcttggactaacttcactgcttggatagttgaaaatcgagtacgactacttacatggggctggttctatgtattaagttttgcttcattcttaattgaatcagataatctgcggatccaaattacgactgcaactgatatcaatgccgtaattttcttgctcgggactagattcttcgctattattttgacagcaatcttccttgatgcaatgtttgcaattttctacttcattactacgcgttactggacttcaacagttttagtaactgtaattacaattggttgggctattgccaacaagattaaattagatcttcgtggggaaccaatttatccaactgaattagacgaaattgttaactggaagaccttgatgccaatggtcggccaacaaaagataattatgatcgctattgccttagtaattatcattgcattgactgtctttcttgcaattaagtttccaattaagaaaaagggctcatggaaacgccgtggtatttgggcattgttgagtttgcttttgttcatgacaccagtgcgctttaaccacgatggcggaattatttatcacattaaccgtggctttgataataagcaatcgtttagaaaccctgaacgtgatattcaaattaacggtccattattgaacttcttgaattactttgacctgcagattatgaataagccaactaactattcaaaatctacaattcaacatttgaatgagaagtacagcaagatcgctaatgaaattaacaaaacaagaaagaatactctaaagaatcaaactattgtttacaacttgagtgaaagttttgttgatccatatactttcccaactgtaaagatcgatcctaaggtgccaaatccagttaaatttattcaatcaatggctaagagatctacttacggtagcatgcttagtgcaggttatggtggtggtactgccaacatggaatgggaaactttgaccggtttcaacatgggaatgttcaagtcaaccttgacgccatatgttcaaattgtgccaaaccatgatttctatccaacggtcggaatggacttcaattataagtctgcagttcacccattcattggtacttactactcaagagtagaagactataagagatttaagtttaataagtttgtttaccttggctctaaatataagatcattgatcaaaagaaacttggtaaatcaacttataattctgattacactacttatgcaaatggtttgaaacaaatcaatagcatgaagggtggtcaattcattaatttgatttcaattcagaaccacatgccttacaacaattggtatccaaacaatgaatacatgggcaaggtatctggtgaactcttcaacactgctgctattcgtgaacaaatggcaacttacatgaagggtgttcaatacactgataaggctgtaaagcaatttatcggtaagattgataagatcaagaagccaatcacagttgtcttctatggggaccactacccaagtatcttgtcacaaaactacgctagtcgttatccagtgcaaatgcactcaactcgctacttcatttattctaacaagtatgctagagaacatggtgctaagagcaagttgactcacaactctaattacgtcaacactagtgactttactgcaatgatgcttgaacaaactaattctaaggtaactccttaccaagcattgttaacagaagttcacaagaagttgccagcaatcacgattaacttcaatggtgatcaaggcttccaattagttgaccaaaaggggcacttcgttgatccaaagaaattgacttcagaacaacaagcaattttgaaggattacgaaatggtgcaatatgatatgactgctggtcaagcttatggcttaaaagctaagggcttttacaagatcggtgactaaataaaagagatcgaacgtaaagttcggtcttttttctacgtaaagtcaagcgcaataaggtgtttggctttattttttacctaaattttgtcatgagtatcttttagtggcgatttatttttttagaaagcatactaaataagcccacctctatatttaatttatgggcttagcgttataatgtacttgatcaattaattacaactaaagtctttttggttatgtgtggctacgttgtaatcatatagttgatcattgataatcagagcataaatggttctgattagtttatgaattgaagcaatagctatctttttgaaccctttggtttgagaggatagctttttgctttcataataatctgctatatgacacggatttgtcttagctgcattatcaatttgtccaatagctcgataaagcaacttacgtgcgactgcattgccatgtttagtaatacttaaattagagtccatttctcctgactgatatctgcctggatcaattccgataaaagcattgattttattaggattactaaatctgcgtaaatctcctaactctgttaaaactctgacagcagtggtctgtgcaaagcctggaatgctttctaggttttctaaatcatgattaggcaaagacttcgctaacttaaccattcttgcgattaaattttctctttgatcacttaaattaagcaatctgtgtgcataatactgcacttgctcgacttctatgctagagcaagatacaactggataagcttgataagctaattcaattaatttatctgcagtccttagagcgtgtttaaaagcaatcccctttaagctcattaaccagttaataagctgttttttatcttctcttcttactaagtcacaatgaggatatcgcacaactatttgccagtaatttttacctttagcagaagaaaatagattttcaatttcaggaaaagtcgattgtagagcttggtgaagtcgatttttagccattactaagtcagctgttaactggtcatagaagcggctcaaagcattaagctgcttataagtttgagattgaagttgattaattggatgatgatatagtctttgaattaaggctaaatgataagcatcagttttatcagtcttattatgacgtagtcccatatccatttcttttttagctttaagaggattaagaattacataatcatagccatagtcttccagaaaagattgcagtgtacgtgaataaacaccggtagcttcaaaaataatttgcggatgtttagaaaaagcggttaattcatgaagcaattgaataaaaccaggacgattattagtaatggttagttcatttttgctttcaccaattagttcacaaacagtagaagtagacttgcttacatcaattccaaaagtaacttgcataataaaaacctccaaaacttagtagtaaaacgtatttacttaagaaatcagatctaattttctaaactcgacatctagtgtccacattcttcgaagagactattgaaaacttaagtaaaactgccagttttgtatacgacatcaagtgtctaaagacctcagggcatatcgttttactactactttaattctacaaaagaataaaaatagtgaatcaattatcccgtcggataactaattcactatttagcttagaatgttttgtatccaatgataaaataagggctaagaggaataactgataattagctgatttaaaggtgattagaatgaaaaagataataacaatggcactagccagtgctgcactatttggatcttctgcaacaactgttcaagctgggacatataatcctaagaacattaccagttttaatattaataggcgtaactatgtagctaagggaaagatttataaactccatttacccgcagctggtagattagttactaatggcaatgttactttaaaaaatagtatggaatggacctgtattccttatggtaaggacaaaaatacgtattatctgcgtaaaggcacatattatttaactagttcaaagaatattagtgtgaagactacttatactcgtttaactaagatccgtaagaatttagaaacttacgttgaaacaaagaagaataatgacaacagtagtcttaaagctagaaagattgaaattggtcaagatattaaagcaatgggtgaaatgtacgattacgatagtgtcgactactacacatttactattgactcacctcaaatggttacgatgaggatgatcaataatccgatttatcagcttggaaaaggtaacattttcagcaagatgaatgtaatcatgttcagtgaaaataatccagttggcggtagtacgatgctttacccagagagtttcgaaattaatggcaataagattgctagtcaaagctggtacttgtctaaaggaaattatacttttagtgtaaatactcgtggactttataattttcaattaacggctgttcctgatacgcgtgtggtaccggcagatactgagatagaatctttacaaaacactaaggatggtatggttgctaacttaagggatgcacgtcatgcgaagacttatgaacttgcatggcgtgaaaaaggctcaaaggcagctccattcacttctagtagcaatactacagaagtaagtactgcacctgctacacgttacatagacaaaaatgatcgtaaaatcccagtttcaattggtaaaaaattagttaatggtcaaagctactattttgtagctcgcggtgtaagcaatccggaaaaagataattattttggtgcttggagtaattcagtagaacacacttactatgcaccttcagatgcaacaccaggtgcagttgatttaaccactgctaaagctgacagtacttatcacaacattcatgtggcttggaataaaattgctagtgcacaaagttatcgcattgcctaccgccaaaaaggtacaaataagtggtactatgaagtaactgatcaggctactaacgcgattactggtattactagaaatagaaattatgaagtgaaattgcaagcattgaatggtgaaaaaactggtccatggtccgcaattaaaacaatttttgtaaaatagcggttgactaaaactatttttctcgttaatatcataactaacaaatgagtagcgagtcggctcagcgttcagagaactagcggttggtgtgagctagacaggccgattttagcgaagtacttaatagggttgctcctttaccggcttgaataaggcgcagcagcgcaaacgtgggtggtaccacggctaataatgtaatttagtcgtcccttggtcttttgaccaggggacgttttttattggaggaaaaactatggcaaaatttgatattttggaagatttaaaatggcgtggtgccattaatcaagaaactgatgaggaaggtttgagaaagtacttagcagaacatgacgattgggcattgtactgtggtactgacccaactggtgattcccttcatattggacaccttattccattcatgatcttgaagagattccaaatggcgggctaccatccagtaattttaattggtggtgttactggtgcgattggtgacccatcaggccgtaagactgaacgtactttacaaactgcggaacaagttaagcacaatgaagaaagcttaactaatcaaatgaagaagttatttggtactgaaaattttgaaattagaaacaatgctgaatggctaagcaagcttaacttgatcgacttcttgcgtgattatggcaagttattccaagttaacaatatgattaacaaggatgttgtagctagccgtcttgaaaatggtatttcatttactgaatttacttatcaaattttgcaagcaattgatttctaccacttgaataaagatgatggtgttcaacttcaaattggtggtagtgatcaatggggtaacattactgctggtattgatttaatccataagcttgaaggcgcagatcgtccagcctttggtttaactattccattgatgcttaaggctgatggtactaagtttggtaaatctgctggtggtgctgtttggcttgatccagaaaagactagtccttatgaattttaccaattctggattaatcaagatgaccgtgatgtggttaaatacttgaagtacttcactttccttagccgtgaagaaatcgaagatttagctgaaaagactgagaaagaaccttggaaacgtgctgcacaaaagaagctggctgaagaagttaccaagtttgttcatggcgaagcaggtcttgaagaagctaaaatgattactgatgccttgttctcgggcaatatcaagaacttatcagttgctcaaattgaacaaggcttgaagaatgctccaagtgcggaagctggcaatgaaaagaagaatattgttgatttcttagttgacactaagattgaaccttctaaacgtcaagctcgtgaagatgtaaagaatggtgccatttatgttaatggcgatcgtgagcaaagtactgatttcgaagttgatccatcaagtgactttgatggtaagtacgttattattcgtaaaggaaagagaaagtatactttagttacaattaaataattaaatatatgattttaacattttatatataaaaatagagggattttttcctctatttttttagctaataatcggagatatttactaccaactaatatttgtaaaagataaagataatgatttgtgtaaaataatattttacttcttaaattgttattttattttctaaaatcaattgctacaatctatttattaagttattcacaaattcacattattactatacaatttgttatttcaagtgtaataccaatataaaatagctgcgtataccttttgcaaatgctgatgcaaagcactctattaaaaactgactcttaataaaaatatgtgaaaagcagcactatctgctttacttctaatcaaacagtgttatagtaatagtgtaaagagaaagtaagtaaatagaaagaggttattaaaatgttagaatctaagaaagctattaagattatttcaagtttggtaatcggtttgagtttaggctgtgttcttactcctattgctcaagctacttcatttactgctcctaaattgggtactgcaacacaagctccaaccaatcctgctattaaaaagggtgataagatctttgttgttattaaagacaccaaaaatcaaaaagtagctgtttacaataaaaatgctgaaaaaactagcaaaaaagttgcaatgggttctacttataccgcaaaagacgttaagaaggttaataaaaagaagattgttagaatcaacaagagtcaatggttgaatactaaagacgtcgttaagaactaaataaaagcaaatttaataaccgttttgaatacttattttctaaaaatacttggagagaataaataaggacgaggatgttcaaatgaatgtcttcgccttttttggtataatgaagacgccgctttagctcaataggtagagcaccgccgtggtaaggaggaggtccccagttcaaacctgggaagcggcttagttgttgtttttggcaagaaaggaaaaattttatgaagcatgaacttacaatgaatgaaattgctaaatttcaaaaagaatatgagcaaaaaccacaaaatcgggttgcggaattggctgttgttaataatggtgtggctaaggctagtttggattcagaaaaggttaggaaattgaaccgcactttttcaattgaaatcccaactgataatgttactgatcaaaagcaatcgggtcgctgctggctatttgcggccttgaatacattgcgtcatggttttgctaagaagtataatgctaaaaactttactttttcacaaaattatttattcttctgggatcgaattgaacgagcaaatattttctttgataatattttgaataccgcagatcgtccacttagtgacagaacagtgcatacttatatgcagggacctgatactgatggtggccaatgggctatggctgtttctttgattaggaagtacggcttagtgccaacctatgctcaagatgaaagtttcactgccaacaatactgctttcttcaatcgtattttgaataataagttgcgagaagatggacttgtgttgcgtaagttagctcaagcaggtaaaaatgatgaaattgaagctaaacgtcaagaatttttgagtgaggtttaccgtatggcagtaattgctttcggtcaaccagtacaaaaatttgaccttgagtttaaggatgatgaaggtaagtatcattttgatggtgatcttactccacttgatttctttcacgactactttactgatgacttggatgactatattgttttgttcaatgcaccagatcatgaatttgataagctgtatgctttgccatttgaagacaatgtagagggcggaagtccagttcatttcttaaacactaaaattgaaaatcttaaagaagctgcgattaagcaacttgaagcaggcgaaactttttggtttggttgtgatgtaggtaaagatagcgatcgtcaaaagggaattttagctcataacctctatcaaactgatgctatttttaatattgaaactaagttaagcaaaaaagagagactggaaactggtgcttcgggttcaactcatgccatgacgatggttggtgtggatgttgttaatggaaagccacgtcaatggaaaattgaaaactcatggggaaacaaggtcggtgaaaaaggctactttgtgatggatgataactggtttgatgaatatctcttcaaagtagttgttaaaaaacaatatgtaccggaaaaactggttaagatttgggaaggcaaagcaacgccggtaaaagcatgggactcaatggcataatggaaattaaacaagttatcgattttactcaaacacacttaaagaatgaaaaaacgggtcatgatttttatcatggcgaacgtgtagctaatttggctagtcaaatgtatttagcagatcatgctgatgctcatgaagatagccgggtagttgctattattaaaacagcgggttatttgcatgacacgattgatgaaaaaatatgtgctgacccacaaaaggtaattgatgaaattaaagttttattgccgcaagtagggtttaatgaactggaggcatgggatattttattcaccattcaacacatgtcattttcagctaatattgagcatcactatcatttgcctttatctggacaatatgtgcaagatgctgatcgtctagaaagtttgggtgcgattggaattgcccgtgcctttacgtatggtggtaaacatggcaataagatttacgatccagagattaagccagccgttttaactagtcatgatcaatatcgtaaccatgtcgaaaccacaatcaaccacttttatgagaaactttttcatttagaagatttaatgaatactcctgctgccaaaaaagaagcggaaagacgaactgcatacatgcgcgactttgtacgtgaatttatgcaagaatggaatgtttagaataatttaattttgaataagccttgatacatcagcattgaggcttattttttaaataaattaaaaataatattaaaaaaaacttgcaaagcaaaaaatatttagctatacttataaacaacttaaagagttctattaattttctcataaacgaggggagcaataatatgaagtttaccaagttattcgctgcaggagcaaccgttttgattgctggctcaacattagcagcatgtggtagtaattctaattcgtcaagttcatcagctaagaaaacaattaattggatggattcggctgaaattccaacgatggacatttctaaggcaacagacgttaccagttttaaccaattgggtaacgttgaagaaggtttataccgtttaggtaagaattctaaagttgagaatgctttggcaacagataccaaggtgtcaaaagatggtaagacctggactttcaccttgcgtgattctaagtggtctaatggtgataagttaacggctaaagactttgtttactcatggcgcagaaccgttaatccaaagacggcttcacaatatgcttacctcttcgaaggaattcataatgccactcagatttctgcaggtaaggcaccagttaatagtttgggagtaaaggctgaaggtgataataagttagttgttaccttagacaaacgaattccatactttaaattattgatgggattcccattgttcttcccacaaaaccaaaaggtggttgaagctaatggctctaagtatggtacttcatctaagactacagccttcaacggaccttttgtacaaaagggctggactggttctaacctttcttggaagcttgtgaaaaacaagaattactgggacaagaagaatgttaagcttgatgctattaattacagcgtgcaaaagacaccatcaacagcttacaacttgtaccaatcaaataagcttgatgctactattttagattcacaacaaactaagaacttaaaacatcaaaagggttacactttgcgtgatactgcagcaaccttctatttgcaatttaaccaaaagaagaagattttccaaaatgctgacttgcgtagagcaatctcaatgtcaatcaatagaaaggcactgggaagtgctttaggtggtgctaataccccagcaaccagtttaacttcaaagggtgtagttaaccatgatggtaaggactggtcagaagttgttggtgataagaagaacgccgcatataacccaactgaagctaagaaactttacaagaaggctttgaaggaattaggcgttaagaacgtttcatttacaatcctgtctgatgatactgattcaggtcaaaagacgactgaaacacttcaaagtcaattagaagaaaacttgaagggtatgaaggcttcagtagctaacgtaccattcaagactcgtttgaaccgttcaactagtggtaacttcgatgttgttgtttcaggttggtcagctgactttgccgatccaatttcattcgttgacttgtttactagcaagaatgcacaaaataacggtaagtggagtaactcccaatacgacaagttgatcgctgattctaagactacagcagatacaactaagcgttgggatgaccttgaaaaagcagaaaagatcttgcttagcgatgaaggaatcgccccactttactacaagactgaagcttggttagttcgtccagacattaagggcattgtctacaatggcgctggcttaaactacaacttcaagaatacttatgtagcaaattaattaaaaaatcaggaggacatagtaatgattattatttcagcaattattattttacaaacaagacataaaaataatctctcttcacttgtaattgcgtaataatagtctagctatgatttgatgaatagatagaaggagcaaccatgtgaaggttgctcctttttgtaataaaaaagaatgagggtcaaaatgaaaaagtggaaaaagtattttagtgcaagtttattaaccgtcgtatcagctgcaactttggcagcctgttcaaataaaagttcgtcatctggtaccaagcaaaccttgaattggatgactaaatcagaattacaaactttagatttgtccaaggtgactgatgcaactagtttagatcaaattaataattcgatggaaggactctatcgtttaggtaaaaattccaaggtggaaaatgctttggcaactaagactgaggtatcaaaggatggtaaagtgtggcattttactttgagaaagaatgccaaatggtctaatggtgatccagttactgctaaagatttcgtctattcatggcgtaggactgttgatccaaagactgcctcacaatatgcttatcttttctcaggagtaaagaatgcggatgatgtagtagcaggaaagaagaaggttgaaacactcggtgttaaagcagatgataaccaacatttaaccgttactttggatagaagaattccatactttaagctattgatgggcttcggggttttcttccctcaaaatgaacatgccgttgaaaagtatggcaaaaattatggtacctcatctaaaacaatggtttataacggaccatttgtatcaaaaggctggaccggttcaaacttgtcttggaagctagttaaaaataaagattactgggacaaaggcaaggtaaaactaagtaagattaattacagcgtgcaaaagacaccatcaactgactataacttgtatcaatctggaaaattagatgtagcattattggcaccacaagctacaaaacaattgaagaaccagagtggttatacaattagaccagcttcttcaacacaatatttacaattaaacgaaaagaacaagcttttccaaaatactgacttccgccgtgcactttcattatcggttaatcgtaaggcattagcttcagctgtaggtggtgctaacaagccagtcactaccttttcaccaaatagtatgactgaagtaaatggcaaagattatactgaattagtcaaaactgctgaaactgataagttaatgacatataaccctactttagctaaaagttattggaagaaagcacaaaaggctttaggacagagcaaagttaacttcactttgctaacctatgacgatgatgatgccaaaaaagcaggtgaatacttgcaaagtactattgagtcaaacttgaaaggcgttaatgtcagagtaaatagtttacctaaaaagactgccttagttcgtggtcaaaatggtaactttgatgctttactgatgggttggcaagctgactttactgatccaatctcattccttgacttgaacacctcaaatgcttcatacaactggggcaagtgggctaataaggaatatgataagtatgtagcagcttctaaaactactggaaacgaaaatactcgttttgaagacttagctaaggctgaacgtgtattgttaactgagcaaggtgtagtaccactttaccagccagcagaagcttggatggttcgtccaactgtcaagggcgttgtatataatggtgctggagctaactataacttcaaatatgcttatgttgaaaagtagactaaaatcctaaatatctaaataatagaacttataacaataaacaactcctctatgtaattaaaaagcagaccgaaaaaatccaatgtcattaagttaagacattgacaattaatattagacttttaaagcactgatttaacatttaattggttaaattggtgcttttttcgtacaacaaataaggcatagcacagattctgcttttttaagctacgcgatataaataatatacagctgatttgggcttaatatttctcttgtccttgcggcctggtctaattggaatggtataatagctgatctgaataaggatccgttcaaaatcttgcgttaaagaagaagccaaatacatgctctgaataatcaagcatgattgcttgaaattgatggcatattgatacttgcaatgcttttgcggaatataggcctgtgcatcaatttgactgattgcattaaacataatcatatgggcataaatttccatttcaataaatttatcttgtttggaatggaactgtacactgcctaaagaatacttcaatttcttgaaggaggtctcaataccccaacgcagatgataaagctctttaattctttttagcggataattttttcgatcaagattggttagcacaacttcccattcttctttgcctgatttggcatcattaattctaaatttgcaggctcgaaattttattgtgcataactcgccaaaatcccagcttagatcctgggtatttttagagcgatacttaatatattggcgataatgatgctggacatggtgaatattctcactggctttatgcgtgatgtagtaatagttagaagtagttaccaggcaggaaatctcacgatcacattcttgatcaggcaatgtcgttatttctttaactccgccttgtccagccttagttcgtattatgtaatgacagttaggcaggcgattgcagttttcaatcatattgaaactagtgtagccacgatccattgttacaatatatggaccacaattcaaagctttaagcatttgaacagccgctttgcgttcatccatttctgatttaggctgaaaaatacaatcctggtaggtattattcaatagatcatataaggcattaacgtgaatttgacaatagggtttctttttatgagaagaagcttgtacaatgttattcgatttcggattccagatttgattaaagtcagagccatcaatggcaaacaaacggtagtgatgatcaaaaagttgaatattaaatagattttgattaaaaacagtcagaatatgtttaaaacaagcaggagaaagctggcttttgcgttgaacataggcagaagtactaactactttatcgttctttttagttgcatcttcgccaaaagctctaaagagttcactgtttaaattctgaccttgcatgttaattgtagttttaaggactgtcgctgcatctaaagtgcgtttcctggtaaaagcatgaggattattaataaaatcgtgaatatgatccccagtattattgataatttgatcaagacgttctagaatattcttatgaagggctttcataattaacaccatctttctggcaataattttgaaggtttaaaatatataatatataagataggcgaaaaggctggtcttttcgcctttattttatacaaaaaaagagatcgaatccaaatgattcgatctctaaaaaagcacccttaattgtcaatgtcttaacttaatgacattggaaaaaatcggtctgctttttgattttcgcttgaaaaaagcaagttaggctagtaaagtaaaactaataattttttgaatgagaaaaggagagcttaaatgtcaaattgggatacaaaattcgctaaaaaaggtttaacgtttgatgatgttttattaattccagcagaaagtcatgttttgccaaacgaagttgatttgagtacgactttggcggataacattaaattaaatattccattgatcagtgcagggatggatactgtaactgaaggtgcaatggcaattgcaatggctctccaaggtgggctaggcgttgtgcacaagaatatgtcaattcaagcgcaagctggtgaagtagccaacgtaaagagcgtagttgtgccaactagtgctgcaaaggccgcaactgatgatcaaaaccatctgctctgtgctgcagcagttggtgtaaccagtgatacttttgaaagagcagaagcattgcttgaagctggtgctgatgcgatcgttatcgatactgctcatggtcactcagctggggtattgcgcaagatcaaagaaatccgcgatcattttccagaagcaactttgattgctggtaatgttgcgactggggatgcaactagagcactgtttgatgctggtgttgatgtcgtcaaagttggtattggccctggatcaatttgtactactagagttgttgctggtgttggtgtgccacaaatcacggctatttatgatgctgctacagctgcacgtgaatatcacaagccaatcattgcagatggtggaattaaatattcaggtgatgttgttaaagctttagcagcgggtggcaatgctgtcatgcttggctcaatgctatcaggtactactgaagcacctggcgaaatttttgaagataatggcaagaagtataagcgctatcgcggaatggggtctgttggtgcgatggcccaagcacacggttcaagtgaccgttacttccaaggtggcgtaaacgaagctaataaacttgttccagaaggtgttgaagctcgagtagaatataagggcgatgtttctgatgtagtctttcaaattgatggtggtctccgttcaggtatgggatattgtggtgctgcaaatattccggaattaattgataaagctcaatttgttcaaatcactaatgcaggtttacgtgaatcacatccacatgatgttcaaatgaccaaagctgctccaaactatacaaaatagatataataaaagttaaaaataagagagaaagcaaaatttctctcttatttttttaattttttggacattttcactagatatatttatttcttttggtataattaaaacagcattaaaaagtaaatgaaagcataaaataaaatgagggagcaattaatatggctagatacctattaaaacgtatattttatatgatcctcactttgcttatcgtggctacggtaacttttttcttaatgaaattgatgccgggttcaccttatgctaatgaagcaaagatgacgctaactcagcggcaaattatggatcaacagtatggtttaaataaacctatctggcaacaatatttgatttatattgcggggatgcttcacggtgattttgggacatccttccaatatagtaaccaaccggtagcttcattaattggggcgcgtttgggtgcgtcagtacaattaggtttacaagcattaattttgggagttgtccttggtgtaatcgctggggcaattgctgctatgagacagggtacttgggttgactcaactgctactgtaatttctattttgggtaaatcagttcctaactttgttttagcagttttgcttcaatactacatcggtttaaagctaggttggttcccaattgctggttgggggcaattttctcaaacgattatgccaacgattgctttggcagttggaccatttgcggaaacagctcggtttatccgaaccagtatggttgataccttaagtagtgactatattgagttaggtaaggccaagggcttaagtagaatggaagtcattagaaaacatgcaatgcgtaattcaatgattccattagtaactctgattggtccttatgctgtagccttgatgactggttcaatggttattgaaaatatctttaacgttcctgggattggtgaacaatttgttaagtcgattttgactaacgactatccaacaatcatgggaattacgatggtttactgtattggattagtagtaattctgttgattactgatattgtttatggattaattgatccaagaattagattagatgaaagcgaggcctagaagacaatatgactgaagaaaaattaaaccttactgcagatgcctttgaacccttaccaaaagatgaagcacaggataacgaaaacattgcaggtccatctttatcgtttgcacaaaatgtttggcttcgcttcaagcagagaaaagcagctattatttctgcaattattgttattttgatgattgtagtagcttttggttcaaccccattcatcaataaatctactttagttaaatcgcacccacaatatgccaatttgcctgctaaagtgccaggaatgagcgcaattaacgggttgaacggtaagattaagcaaaatggcaagtgggttgatgcttatgcccagaatggcgtgcctaaagataagtattttatcgcaggtacagattatttaggcagatctttgggacaaagaattatctatggtacaaagatttcattgatcgtcgctttagttgcagctttctttgatttaactatcggagtcgcgtacggaatagtgtccggatggaaaggcgggggagtcgataacgtgatgcagcggataatcgaaattatttcctccgtacccaatttgatcattgtagttttgatgttggtggtattaaaaccaggtattaagtcaattatcttggcaattgctatttcaagttggacgacaatggcgcggcaggtccgggctgaaacgttgagtttgaagaatgaagaatatgttttggcagctagatcattaggtgaatcaccttggaaaattgcttggaaacacttagtgcctaacctttcaagtatcatcattattcaaacgatgtatactattccaactgctatcttcttcgaagccttcttaagtttcatcggaatcggtatttcagccccagaaacttcactaggtgtacttttgaacgaaggacaaaagaattttcaattcttgccatatcagatgtggtatccagcaatcgtattgtgtgtgttgatgattgcctttaacttattaggtgatggtttgcgtgatgccttcgatccacggggacaaagatagaaaggattaacctaaatgccagaagaaagagttttagatgttaaaaatttaaaaattgatttccacacttatgctggtgaggttaaagctattcgtaacgtttcctttcacctaaataagggagagacgctcgcaattgtaggagaatcaggttcaggtaagtcggttactaccagaagtattatcggtctgttagcacgaaatgctcagattgaagacggtgagattgatttccacggcaaaaatttgctagagttatctgaaaaagaaatgcaaaaaattcgtggtaacgaaatttcgatgattttccaggatccaatgacttcgcttgacccaactatgaagattgggcagcaaattgcggagccattaatcaaacataagggtgcctctaagaaagaagcttgggctaaagccttggaaatgatgaaggccgtgggaatcccaaatgcagaagaacgaattaatcaatatcctcaccagttttcaggtgggatgagacaaagaatcgtaattgcgattgctttaatttgtgagccagagattttgctggctgatgaaccaactacagctctagacgtgactgtccaagctgaaatcttggacttgatgaaagacttgcaaaagcgggttaagacctcaattattttcattacgcacgacttgggcgtggtggccggtatggcagatagagtagctgtaatgtacgctggtgaattcttagaattcggtggtgttgatgaaattttttatgatccacagcatccatatacttggggcttaatcaattcaatgcctactttaaacagtgatactttggagtcgattccaggtacgcctcctaacttgcttgatccgcccaagggtgatccttttgcaccaagaaataagtatgccatgaagattgatgtggaaagaaagccaccatttttcaaggtaactgatactcactatgctgcaacctggcttttagcaccaggtgcacctaaagtggaaccaccagctgaaattacacgtcgctggaaaaaatataacttgatgaaacaagaagataaactgccagaggttaactagtcgcggtaaaggagatttttatgccagaaaaaaagaaaattttggaagtaaaacatctaaaacaatactttaaaaatggtcgtaatgtcaccaaggctgttgacgatgtaagctttaatatctatgaaggtgaaactttcggcttggtaggtgaatctggttctggtaagacaactactgggcgctcaattttgcaattgtataagccaactagtggcgaagtgatttttgaaggcaaaaatgtagcagatttaaaaagtcgtgcagacaaactagcttttacacgggatgcacaaatgatctttcaagatccttatgcttcacttaatcctagaatgactgttgaggacattattgctgaaggattagatattcaccatttggttaaaaataaagatgaacgaactgagagagtagaggaattattggaaactgttggcttaaatgcaagtcatgctagccgttttccacatgaattctcaggtggtcagcgtcaaagaatcgggattgctcgcgccttagccgtagagcccaaatttattgttgcagacgaacctatttcagctctagacgtatcaattcaagctcaagtagttaacttgatgattgaattacagaaaaagcgtggtttaacttacttgttcattgcccacgatttatcaatggttaagtttatttctgaccgaattggtgtaatgcactacggtaaactactggaagtaggtccagccgatgacgtctatgatcgaccacttcatgattacacgaagagtttgatttctgcagtgccaattcctgatccagaagttgagcggagccggacaaggattccttatgacgctcaaaaagaagaaatggacggaaagcaacgctcaatgcatgaaattcgtccaggacacttcgtacgctgctctgacgatgaagtcaagcattacgaagaagtagcggcaagctacgaaaattagataccaaatctaatgcaactctctctatattaatattatatttatgctaaaagtgtctgggaaaaaactaagtctcagatcatgaaaaaagaacgttgaatttttgtttcaacgctctttttgtatacttttagctccagccttgatattattaaatcatcacaaaataaaaaaggtggaaactaacatgtacaagaattatatcacaggtcaaactgctttaacacttaatctagattttgccattccggccaatcatttggctaatgtcatcagctggtttgtagattcaattccagaagatgttttagtaggcaagactgctaaaacgggccgcccagcctatcatccagccatgatgctcaaaatactgctttttgcttactccagaagagttttttctggcagaaagattgagttgatgctggaagaaaatctgccaatgatgatcttggctgaccagcaaaagatttcatatcatactatcaataattttagatcaagcagccatgccaatgaactgattaaaaagagctttatctacttcactaacctgttagaagatgaaggcttaatcaatgaaggtgctgcttttatcgatggtactaagattgaagctgatgctaaccgctatacatttgtctggcgcaaagcggttgaaaagtatcatgaaaagctgaaaggccaggcagttgaactttatgatgaattgattactaaagaagtagtcaaagaaatggaaaaagaaaaagttcaaactagtcaggggctaaaggaattagctcaagaaactgaagcagaaattaacaagctgactaaagagattgagcaggaaaacaaagccattcctggcggttcacctcgaaaagccaagcgacgtggactaaaaaagattctgcaccggctaagaaaagattatgtgccaagaatgcaaaaatatgaagaagccgaagagatctttgccggacgcaacagttattccaaaacagatcatgacgccacctttatgcatatgaaggaagaccacatgaaaaatggtcaattaaagcctggctacaatattcaagcagtcacgaccgatcaatatgtagttgattatgccatctttcctaatccgacagatttcaaaactttggagccggttttggatcaaatgaccgtgttggacaagtttgacaaaatcgtcgccgatgctggctatggcagtgaatacaattattcgatgctggaggaaaaatatccagacaagaagtactttattccctacactatgtatgaaaaagaacagaccaaaaagtataagaatgatccaactaagctaatcaactggtactacaatgaaaaagatgattattacattgatcatcatggcgtcagattcaatttcaaatattacagccagcgtaaggatcgttctactggtcaggtccgtgattttaaggtttatgaggcagacgagttccagctaacgccagaattggaacaattggctaaaacagctagcggccgccagcgccaagttcgctataatcctaactggcaatatttaaaagaaaaagcaaaagaagttctccaaagcgaagaaggcagacacatctatggcatgagaaaatatgatgtagagccagttttcggacatttgaagaacgtatttggcatgcgcagaacgcacctgcgaggtaaagagaaggtcgaaaccgatatcggaattgcctttatgatgatgaatttgaacaaatattgtcaaagaaggtggctgaagggccgatttttattgttaaaaattttaaagagaacaaaaaaacgatcaagattcttaaaaaaggaaatcttgatcgtttttattcatctggaagctagttttttcccagacacttttatatgatcattgctcgttaagctaatgaatcccatgctggtaggtcagtgattggaccttcagcgagcttcttttggttttcagttaagtacttcttgtggactacaacttcgtaaacatagtccttaaaccattcattattcatgacgtagaagcctttaacaccagatttatcgccccatgagttctcaactttccattgacgaacttcgccgttgtcttcatcaacaccaactaaagtcatggcatgtgacacttgaccgacgccggtctttaatctgtctgctttagacattttaaggtcaacgccgaataagtcatctaacttgtacaaattagtgtcaaggtaaccagttttacggtccatttgacgtaaaacatcgttaccaaaccaaacagcttcgccgtcttttaattgagcgatagcagcgctggacaagtattccattggtacattcaaaatcttgattctcagtgagccttcaatgttgtcttcagctggtagaccataaagcttgttatagtcatggtctggagcattggttaaaacaacatagtcatcaaaatcaacgtcgcccatgtacttgtgtaaaaactcaagtggagttaggttcttttctaaatgatatttcttgtcgtcatcacgatattcaagatcgaaagtcttaggtggttcacctactgcgatagcagtcatttggtaaacttcgcttaaaaatttttcgcgaacctttttaatttcatcatctttgccgtattgcttcaagtggcgcaatactaaagcatccttctttaacttatcgcctaaagcagtcgcaaaaccagtagtatcattggtgttaaaagtttctggcattgcatatgaaggaacaacaccatatttttcaactaaagcggcagccatttggaattgtccaccatcactaccagcaaagtctaagtcagccttaacttgacgtgaatcaagtggcatgtcagcactgtctaagattctgttgtagaacatgttagcacgttcgatcttatcccagaagaagttgtaagcttgtgagaaggtgaagtccttagccttatatttcttaccaaaagcgtggcgcaaaacgttcaaagtcgcaaacagccagcaacgaccagaatgtttttggttagtgacattatttgtatcaagttcagttgaaaagacgcgggttaattgtccttgaacacgatcattataagatgcttcaagtacaccactgcgttgagctgcacgagcaacgactttattttcaggttttttattaaattcggcagagaacttttctagttcctgcacagttaattcatgagccataaaaaatctccttttcattttataatttttttctcaatttaattctattttaaagcaaaacaaaagcgggttcaatcagaactcgcttgagagaattattaatccgtcaacttattagatttcttgcctatatctaataaattaatcaatttggatagaattgccatcattgccagcagtttcctttggcaaagtgatggtcaatacaccattatcatactttgcatgaatctcacttgcaactacatttggtaatctatagcttctagaaatactgccctcacttctttccttatgaatgatatttctatttttatcgctagtgtccttaaatgattttcttgtgccgctgacatttaacgtaccgtcattatagttaacgttgatatcctgcttatccatgccaggcatgtcaatcttaactagatagtccttatcagtttctgcaacatcagattgcataatgttttcaatttcattatcgtcaaagaagtttcttggaaaaccaaaccaatcattcattgtatccatcatgtcgttgcgccgattcatcatattgtttgccataaataaaacttcctttcatttttgtatttgcttaattagaatataaggaaaagatcaactcatttcttgatctcttttctccttacactgtttattgtagtcgctttttatagaaatgacacaaattagcactcaaaaatatatagtgctaattttagactgataacgctgctacaataacattctgagattgtagataattattacgtatagaaaaataaagaaagtttgtgaaatagaaatggtatattttcagaaaatgactccagaaggctatcaacaaattgaggatgaaattgctcgattaaaaaaagatcggccacgtagaattaaaattttgcaggctgcacgagctttaggtgatctttcggaaaatactgaatatactgaagcaaaacgtgatctaggtcacttacaaagtcgtctgcgttacctaggcaaacaattaaagtatgccgaaattgttaaagctgaagatgatggtaaggttgatctaggaaagaccgttgtgcttaagtttgatgacgatgatgaaacagaagaatacaaagtagttgggcgaatggaagcggatcttgctgctggcaaggtttcttttgattctccattgggtcaagcaatcatgaaaaaggaggctggtacaacagcaacggtggctgcaccagcaggtgaatatcaagtaacgattgtggaagttaaataagttgagaactataataaactgtctttttctggtataatatgggttttgtaggatacaattcagagtaggagtgaagaatttgaatacgccacaatcaagagagggtaatgtgatccgctatgccgtttatttagctggctatgtcgctgtgtttgcagtagtaaagctagttactagaaaatctccggttcatatttgggatttgattttattcggcttagttgcagccatgattctgttgttttatgtttatcgtttcaatcgagagcaacgcttttttgcccgtgattttaaacttccatggttgggcagtttgtcaactgttgttctattaacattagtgattacagttacacagatttcgatttcatacttacaatcatatggcaggattagtcattatgatttccaattgatatatgccaaaagtgaatcagttaacatgttttggtttttaatcgttgtccaaggaattgtattaccaatcctacaagaatttttggcgactggctttttgttcaattatgcttttcggcgaaatactaagcaagttgcaattatggggatcattgtttcaggtctgatttatagcttactgaactttcaaaattcagtagtactctttattattgatgcaatttatggcatggtgtttgcttggagctatatgtacacacaaacattattgatgccaatttacttagctgtagttagtggcgtacttacagtgattatgatttaaaaacaaaaggatgagaaaaattctcatccttatttttttatacaaaaagcggatagcgtgaatcgaacccgcatctacagcttgggaagctgtcgttctaccatttaactatacccgcaatatgtttttattttagcattttttctatttgaagatcaacacttttacgatcaattaagctggtaaaattttgaaaaagccagcggcgtagttcgttgggcataacaactagaggcattctattatggattggcgccatatctttgttaggcgcggtagtaaccattgaaaaataatcctgatcataaatacctgcaattaaggtaagtggttgattagtgcggaaggcgtagctatcatggtatttacgaccgttttcagcaatatgggtagttttagcatattcaaagaatttttcggttaagattaagcaacgttgcttggcaaaggatttgtcccacattgaaggcgctgaatcataaaatcgctcaattctagcgttaaataatggcttttttggatcaacgggacttggatagccccattttttgttgtttaattgcaattgaccattttgataaagcaaaacaggtgctacttggttaggaaaaatatcttgtgcttgaatgtcaaaatttggtgtaactaagggcaggtcaagatcgcttttgagatattgttgaatttgttttaaattaggtaaacgaaactggttgcacatacgcatttcctttctttagggctagtttaatcatagcctattttttgttaaaattaggtaattaaacaattaatattaataaaaaaataaacttaaaaattagaaaagagcaaaaagatggcgaaagaaattttattaactggtgaccgtcctactggtaagctgcacattggtcactatatcggttcattaaagaatagagtaaaattacaaaattcaggtaaatatgatccatatattatgattgcggatacacaggctttgaccgacaatgctcgtaatccggaaaaaattcgcaatagtttgatccaagtagctttagattacttagctgttggtattgatccagctaaatcaactatttatgttcaatcacaaattcctgctctatttgaattgactgcttactacatggatttagtaactgtggctcggcttgaaagaaatccaactgttaagacagaaattaagcaaaaagatttcaaagactctattccaattggctttttaaactatccagtttctcaagctgctgatatcaccgcttttaaagcaaccgttattcctgttggagatgaccaggaaccaatgttggaacaaacacgtgaaatcgttaggacttttaaccgtgtttataattgtgatgttttggttgaacctaaaggttatttcccacctaaaggtcaaggacgtttgccaggacttgatggtaatgcgaagatgtcgaagtcacttggcaatgcgatttatcttgctgatgatgcaaagacagttcaaaagaaagttatgtcaatgtacacggatcctaaccatattcacgttgaagaccctggtaaggttgaaggtaacactgtctttacatatcttgatgtcttcgatccagataaggacaaggtggcagaacttaaggcagaataccaaaagggtggcttaggtgacgttaagattaagcgttacttaaacaaggtccttgaagcagagcttgcaccaattcgtgaacgtcgcgaaaagtttgctcaagatgaagatgcggtttatgaaatgcttctggaaggttcaaaaaaggctaataaagtggctaatgcaacacttgaacaagtccgtgacgcaattggtttgaactatttcaagaatagataaggctgaggtaaagttatgcacgatcgaattccttggaaacaatattttatgatgcaggcgctagtaattgcgcaacgctctacttgtaatcgcgcattagttggtagcgtcttagtaaaaaataatcggattattggcactggttataatggttccgtttcaggacaaccgcattgtgacgatgtgggtcatcaaatggttgatggtcactgcgttagaactattcattcagaaatgaatgcgatcattcagtgtgctaagtttggtgtttctacagaaaatactgagatttatgtgacacattttccttgctataattgctgcagatccttgttgcaggcaggcgtgaaaaaaattaactattattttgactatcgcgataatccattggcgatgcaactacttcatgatagcggggtgccttatgaacagattaagattaatcgcaaatacgtggaaagcttggcccataaacttgaagaagacgagaattaatttaatttggttaatgggactagtaactgtatttttaataacgacaggatttgtccagccaaatattgaagatcatgctcatattttagataaagaaactcgcactttgattacggaaaaaaataatcgctattttcagactaaagaacaaccgcaaattgtcgttataacggttaaaaggctgaataagttaacacctaagatgctagatcattctaagcgaacggtctttattgtggtaggacagaaaggtaaaaagcgtaatgtgcaaatttattcaactaaagatttgcatagtgccttcaccgaggtcgctcggggcaatatcttgcgtgctgaagtagataaattgcgtagtcaaaataatgcaacttttaacaagggaattcgcttcgtctttcgggcatgtgcgactagagttgatcaacaatatcaatatgcacttgataaatatgatttgacgcaagcagaacaaaataaagtcgcgcgtccacatagtgtagctttaccaatcgcactggcactggcatttttaattacgggaattacttatttcttgcgtagatttagtcatcgtgatccaatttctaagaaatagtcggcttgacttatttgcattttgtccttacactttttatagacataattagcgaaaaactgttaggtgagactcctacgtgaacacacgctatcgcccagaaacatccagagatgccaacgggttaaataggtgtcgtcgacttaaggcgagatccagatagctagcatgtgcttacgtcacgtagtgttaaaactgaacgacgagtatgacagagccttgtttggcaaaagtcacctgcagagttacaggtggcttttttgttttgcttgtcccaattaaagaagggagcaaataatgttaaaagcagctagcaagaagcgatcgaatatagacattcaaaggattcaacggattgcgcgtgagtcacgtagcgagacgctggcgcgtttacaggcgagtgctgaagggctttcgactaataaggctgaagaaaacagaagagaatatggcaaaaacgaaatcattactaatagcaattcctctaaatggcgcttattatgggaatcaatcgctacgccatttacgttggttttattagtattaactttattaaccctgtttactagctatattttggtgccacaaggagataatgacttaattactacgatagtgatgatcgtgatgttgattatctcggttctcgtcaattttatccaaaaaatcagaattgctaaggtaactgatcaattactcaatatggtatcagttacaacgaatatccggcgtgatggcaaaaatgtggaattgccaacagatgaagtagtggttggtgatgtaattaacttgtcggctggtgatatgattccagcggatatgaagttgttaactagcaaagatcttttttgctcatcaagctatttagatggggatcctgagccggcagaaaagatggctaatgtagtaattaagccgagtatggctaatgattatttgaactaccctaatattctatatgagggaacaactattgtttcaggctctggcaccgggattgtttttgcaattggcaatcacactgtttttggcaaagcagttcaggctatttcccgtaaaaaagtaaaaactaccctgtttgaccgggaaatgaagcaattagctaaaatattgattatcgcgacagcaattgtgattccgcttttgtttgtgattaatggcctgactaaggggaattggggggggaaagcttaattttcgctttgacagcggcagttggcttaacaccagaagtgttgccgattattgttaattccaatttaacacggggcgcacgggaaatatcccaaaatggtgctgtcgttaagcaaatgaatgctattcaaaatttgggctcaactgatgtgttctgtatcgataaaaccgggactttgacacaaaatcaagtggttttagagcgtcactatgatttagatatgcaagaaaccccacagattttgaagttttcatatttgaatgcatattatcaaactggggtaaaagatttaatcgataaggcggtaattgatgccgcgggcgatgaactagatgtaaacgaaattcagcgtgattacaataaaattgacgaaattccctttgactacactcgaaaaagaatgagcgtggtagtggtagataacgatgaacaccacgggcagcacttattagtaactaaaggtgccgctgaagggatgctggcaatttctaataaggttgaacttaatggaaaggttgaggatttaactactgcctggcgagaaaagatcttaaatcagattaatgaattaaacgatgacggtttacgggtacttttagtaggttataaattaaatcctgccccagtaggtgagttctctgctaaagatgaacatgatttaaccattattggctatttggcttatcttgatccgccaaaagaaacaactaaagaagcgctggaagatcttaaaaaagattatgttgatgtcaagatttttactggtgataacgaagcagttactcgtgctattgctttgcaggtgggattaaacgttgatactgtttatgacggcacccagatcgaagcggttagcccggaagagttgcgtgaaattgttgaaaaatgcgatatatttgtgcgaataaccccggaattaagagtaaaaattattaatgcactcaaagcaaacggtcatacagtcggttatatggggaatggcaataaagacgctttagcaatgaaggtagctgatgtgaccgtaacttcgaatacgtcagttgatattatcaaagagtcagccgatattatttttgagcaaaaagatttgcagctgttagaagaaatgattctaatgggccgaaaagtcttttcaaatacaatgaaatatattaagaccttcttggtaactaacgctggtagtgtaattgcgatggttgtttcatcgctgctcttgccatttttgcctcttttgccattgcaagttttaattttaaatttgctgtttagcataagttgtctggttattccctttgatagtgtttctaaaaactatgtcaaaaagccacaaaaatggtcgattaagagatggccgaagtttgtacttaattttggtccgattctagcaattattgattttatcgcaatgggcttgatgttttatgtgatttgtccatatttagtagggtctaattatcatcattgggtctttatgacactattttattcggggatttttgtggaatcgctttggacaagaattatggtgattcacactttgcgtgatgaacgttttccattctttaagcaacatgccacgccagtggtgttcttggtgaccattggtatggcaattattggtacaatgttgccttcatcaagtatcgcgccaagtttgggcctagctcaattgccgtttggttattggggcatagtcttcttgctagaagtaatctacattttactgacgactttggttaagcacttatatttaaaaaaagaaaaattctgatttgaattaaaaggaattgctggttttagcccaattcctttttttgcatgttaaaataaaatagatattttagacgattaaaggagtttgattaatcaatggctgataaagatactttttatattacaaccccaatttactatccatctggtcgcttaacgatcggtaatgcttatactactattgcagctgatacaatggctcgttacaagcgcagtcaaggctacgatactttctttttaactggtactgatgaacacggcttaaagattgaacaaaaagctgaagcacaaggaattaagccacaagagttcgtcgacaagatggcggcttcttacaagaaattatggaagagtctcaatatttcttacgataagtttattagaacaactgacaaagagcacgtagctgccgtacaaaagatttttgaaaaattattagcaaaaggtgacatctacctaggcgaatatactggctggtactcagttgaagatgaagaatactttactgaatcacaacttgctgaagtttacaaagatgatgatggtaatgtaatcggcggtaaggctccaagtggtcatgaagtacgtttggttaaggaaccatcctacttcttcaagatgagcaagtatgctgaccgtttggtggaatactacaaggaacatcctgaatttattttgcctcattcacgtgaaaaggaaatgcttaataacttcattaagccaggtttggaagatttatcagttacccggactactgttaactggggaattcctgttccaagtgatcctaaacacgtggtttacgtttggatcgatgcactttcaaactatattaccgctttgggctatggttcagacgatgattcattgtttaagaaatattggcctgcagacgttcacttggtaggtaaggaaattgttcgtttccacactatttattggccaattatgttaatggctcttgatttgccacttcctaagcacattatcggccatggttgggtattaatgaaaaatggcaagatgtctaagtcaaagggaaatgccgtttatccagaatcattgactagtcgttatggtgttgatccacttcgctattacttgatgcgtgctcttccatttggcgatgacggtatttttacaccagaagactttgttgaaagaattaattatgacttggccaacgatttgggtaacttacttaacagaaccgtgtcaatgattaatcaatatcaagctggtcatgttgatgcagttcctgttgctcaagctgaatttggcaaagacttgcaagatacagctgctagtgtcattaatgattatcgcgaaaatatggattcacttcacttttcaaaggcattagacaatatttggaagttggtttctcgtgctaacaagtatattgatgaaactactccatgggctttgaacaaagaaggtaaaaaggaagaacttagcaaggtcatgagcaacttggctgaaagcttgcgtttaattgctattatgattgaaccagtaatgaccgaaactgcaccaattatgttcaagcaacttggtttaaattgggacaatgaagacgctaagcatttggcctttggtgactttgattgggatgttaaagtaattgaaaaaccacaaccaattttcccaagacttaagatggacgaagaagttaagtacatcaaggatgaaatggctaaagctaagccaaagaagaccactagaagtgaacaaaagaagggtgacgaaatcaccattgacgattttgacaaggttaagatccaagtaggccaaattttgtcagttgaaccagttaaaggctcaagcaagttgctcatgttcaagctggactttggtaatggcaaggaaacccaaattttgagtggtatccgcaagttttatccagatgcaagtgagctattagacaaaaaggttttagctgttactaacttaaagccacgtaagatgctgggtcaccttagtgaagggatgctcttatcaagtgaaaagcatggcaaaattaagttagctcttgttggtgatgaacatgcagttggggctgaactcggctaatggagatcattgataatcatactcatttgaatgacgagccgtttcgcggcaaggaacaatattatttagaacgagcaaaagcacttgatgtaaccaaggttatttgtgcggggcaagatcctgactttaatcaaagagcggttgacttagcacaaaggtttgataatgtctatgcgatggtcggttactgtcccgatgtggctaaagactatgatcaacaggctgaagataaactaattgaacaattgaagcagcctaaggtagttgcaatgggcgaaatcgggctagattattattgggatgaatcgccgcgcgacgtacagcgtaatgtttttgcgcggcaaattgaagtagcacatgacttgaagatgccggttgatatccatactagggatgcatttggagattgttataacatcttaaaaaatagcaatctggaatatggtgctgttttgcatagttttaacggtggtgttgactggttaaataagtttttggatttgaatgtttacttttcatattcaggtgttgtttctttcactaaggctacggaagtacacgagagtgcaaaagctgcgccacttgaccgaattttagttgaaaccgacgcgccatatttaacgcctgagccatatcgtggtcatcaaaatgaaactggctacgtacgttatgtggcagaagcaattgctaagttgaaggatattccactagagaaagtggcggatgctacttataagaacacagtgagagtttatgggcttaaataaaaagaattttgatgcggtaatcgttgttgaggggaaagacgataccatccgtttaaaacaatttttcccaggaatcgagacaattgagactaatggatcagccgtttcagatgaagtattgaagcaaatccaaaaattaagtgagagtcggcaaattattgtctttactgatcctgactttaatggcgaaagaatccggcgcattgtaactaaagctgttcctgatgcaaagcaagcttttattacccgtaaggaaggcgaacctcataaaaaggggagtctaggtgtagaacatgcttcaaaagaagcacttgagcatgcactaagtgatttgcatgaggttgaaccgcaaaaaagtgatttaactccagcaatttatcggcaattaggtttagctggtggtagcggctcacgaaaattacgtgaacaagtaggcattaaattacgagttggctatggcaattccaagcagttttataatcgcttgcatacttttggcgtttcattagctgaattaaaggcagctgtcaaggaggtagaaaatgacaaataatattccaattggctctccagttagaacacaagcaattgttaaccgttactttgtcaaagctaaaaagaacttagggcaaaatttcttagttgatcagactgctattttaggtattgttgaagctgctgggataaaaaaagatgatcaagtcattgaaattggaccaggtattggctctttgactgagcaactactgttggcaggcgctaaagtttttgcttatgaagttgatgatagcttacctacgattttacagaatgaactgcctaagaaaattgatgatcagcctttggctagtcgctttaagattttgcttaaggatgtattaaaggctaattttaaagaagatattggtgacttttttgacttcactaaaccgatcaaagttgtagccaatttaccatactacattacgacaccgattatttttgctttagctgaatctgacttgcgctttactttgctgaccttgatgatgcaaaaagaagtggcagagcgattagaagctcaaccaggtagcaaggattatggcccattaacgatttctgttcaaacagaaatgaaagttaagcttgctttacaagtggggcgtaattcctttatgccacgacctaaagttgattctagtgtagttgttttgactccgctaaaagaaaagcctgctattgaagatcgcaagcactttattttggttgtgaaaatgtgcttttcacaaagaagaaagacactgaacaataacttaaagtcattattgccagataaaaccaaacgagatgaattgattacagaattaggtgtagaaccacgaattcggcctgaagacctaacaattgaacaattcattaagattgctaaatttattcctgcaaagtaatgcctaatattgaatttattatatatttgtgatattatttacataaaggagctgttgtttagtgccaacatcaattatcacaattaaacataagttggattctcacttaggtgatactttaacagtagtagctcaagcgggtcgtaagaaagttactaagagacggggaattctaagagagactttccctgcagtgtttgtggttgatttagaccaacatcaaaataattttaaacatgtttcttacagttataccgatttactaactaagaatattgcattagagtttgatgataaagctgaagaggctgaagcttaaacacaatttctgaaattgtcactagcatttatttaaaatgttagtgcttttttttgccctttagagtatattaattaagtataaaccaaacattagaaaggagatttcatgaaacgttcagaaagattggtggacatgaccaaatatttaatggagcgtccccatactttaattgcactatcattctttgctaagcgttacggcgctgctaagtcatctatttcagaagatttagctattttgaagcacactcttgccagcaatcaagatggtattttggagactgtagccggtgcagctggtggcgtgcgctatattccatttttaggtaaaaaacacgcggaagcatatttgtcagatttatcaactaggattgaggatccaagtagaattttagccggtggttttgtgtatctgtcagatattttaggcaatacgcaagatttacgtaaaattggtgaattagtagctactcattatgcttatgaagaaatcgatactgtcatgacagttgaaacaaaagggattgctttagcccaagcagttgctcgttttttagatgtaccatttgttacagctagaaagcgatcaaaggtaacagaaggtgctactgtttctgttaactatatttcttcatcgttgtctcgagtatcgaagatggaattaccgactcgtgctcttaaaaaagaagctaaagttttaattgtcgatgattttatgaagggtggcggtaccctaaccggaatggaagaattagttaaggaattcgatggtactattgccggcgtttgtgtactctgtgaagccgattttgacaaagaaaagctgattaagaactatctttcattagtaaaaattagtgaaattgatactgcccaaaagctgattgtagcagaacctggtaacttcttaactgaaactgattttgaccgtttctaaaatggtatactagaatcaagttttgattattaagaggttaatattaatggaaaaatatgtagttgttcttgccgcaggtaagggcacacgaatgaagtcaaagttgtacaaggttttacacaaagtttgtggtaaaaccatggttgagcatgttgttgatgcagctcaaggcgttagtcctgcagaaatcgttacaatcgttggtacaggtgctggcgatgtagaaaaagtactggcagacaagtctaagtttgctttccaagaaaagcaattaggtactggtgacgccgtaatgactgcgcgtgaagaattgggtgacaaagatggtgctactttagtagttactggtgatacaccacttttcacaactgatacatttaatgaactattcaagtatcatgcagaaaaaggcaatgctgcaactgtattgaccgcggaagctccaaatccatttggctatggtcgaattattcgtgatgatcaaggcaatgttttacgaattgtagaacaaaaagatggcaaaccagaagaattaaaagtaaaagaaatcaatactggtgtattttgctttgacaataaaaaattatttgaagcattgaagcacgttaataatgacaatgctcaaggtgaatattacttaactgatgttttagaaatcttgcgcaatagtggtgaacgcgttggtgcttacaagatgcctgactttagtgaaagccttggcgttaatgaccgtattgcattagctcaagctactaagactatgcaaagaagaattaatgaacagcatatgcgtgatggtgtttcatttatcgaccctgatactgcttatattgatgcagatgttaagattggcaacgacactgtaattgaaggtaatgttgtgattaaaggaaacaccgaaatcggtagtgattgctacattactagtggttcaagaatcgttgattctaagattggtaataatgtcactgttacttcttcaactgttgaagaagctgaaatggacgataatactgacatcggtcctaattcacaccttcgtcctaaggcaattattcgcaaaggtgcatatattggtaactttgtggaaattaagaaggctgagattggtgaaaatactaaagtaggtcacttgacttatgttggagacgctaccttaggtaaagacattaacattggctgtggtacgatcttctctaattacgatggtgtaaagaagttccatactaatgttggtgatcatgcctttattggcgctggctcaacattgattgctccaattaatgttgcagatcacgcctttattgcagctgataccactgttactaaggacgttaataaatatgacatggcaattggccgtggccgtcaagttaataagccagattattggcataagcttcctctttctcaagataaagaatgggattaagaataaggcactagtgtatcaagctagtgcttttttgttaagaattgctaaatacttattgcaaaataataattgagacctacaataaggtgtactaataataatttttacatgaggtaggtaatactatgaaattaagtcataagttagttatggtttcagcagctgttttgatgggtgttagcccagtattaggcatggcagaaaatactgtatctgttcaagctgctactaagagtactaatggcgtacataatacttacggtaaaaacagcaaagtcaaagtaactaagactatgaagtttgtcgaccgtaatggtaagaaaacttctaagactgctcctaagggtggtagctacactatttggaacgtcaagaatatcgacggtcaagtttactacagtattcaaactgatttgaagtactggattcctgcaactgcaactgaaggtacagtaacttataagtcaggcaatactacttatactttaaagagtgatggcaagaaggtaacaacttctacttcaactaagaaggctgttaagaagactaattcaaataaaaacactaaaaaagtagttaaagaatcaactaagaaaactgccactaagactactaaaaaaagcaactcagaaaagactactaagaaaacttcatcaaagaagacgccagtggctaaggcagttaagataactactaagaataaggcttacgtttacgacaagaatggtaagcgtgtaaaaaactatttaggcactagttacattggtaaaaagatcactgttaaaggtttaggtactaagaccattaatggtgttaaatattatgctttgcaaccaaatcattattacattaaagcttcagatgtaactgttaagtaataattgataggaaaaagacactttttcgtttctaaattggcaaaaaaatattttagatctacaatatataaatgaactttaagtttagtaagaatgaggtatttatcgatgaaattaagtcataaattagttatggtctcagcagctgcattgatgagtgttgctccacttttgggtactgcagaaaacgtcaacactgttcaagctgctcctaagaagactacttcaaagaaggcagcaagcaacaagatcactttggtacgtaatgcttatgtgtacgataagaatggtaagcgtcttgataagtacatgggcagtgcaaaatacactactattgctaaaggcgtaactgttacttcaactggcactaagactatcaatggtgtaaagtactacgatcttggtggtggtgcttatatcaaggctgttaacgtagatggtaaagctgcgtcatcaacttcatcactgtcaaagggtactaaggctaagtttgtttctaactcatacatttatgacaagaacggtaaacgtatcagcaagtaccaaggcaaatctaagtttgttaagggtgattcagtcactacttacggtattcaaaccattaacggtaagaagtattaccaacttgacaagaagggtactgcttttgtacgaactgttaacattgatggtaaaaccacttcaaaccaagaatcatctgtttcaaatgatgcagaatcaactaaaaaatatgactactcattaaagaagaatgcttatatttatgataagaatggtaagcgcatcaacaagtaccaaggcaagtctaagcttttaaagggtgccgcaattgatgtttatggcattgaaaccattaagggtaaggattactaccaacttgacaagaaaggcactgcttttgttaaggcaagtaatgtaactagaaccgttaaggcaacttcaattaccatgaagaagaatgcttatatctacaatggtaacggtgacaccaagaagaagacagttaagaagggtaagactgttaaagctactgaagcaagatacattggtactaagctttactacaagattggtgataatcaattcgttaaggctgctaatgtaggtaaaatttcaggcccagaactagaaccagttaacgaaccagatggtgctgctactgttgatactggtgataatactgtagatccaaacgtaaccaaggtaactacgattaatgttgctccactttacaacattaagggacaaccagataacgttagagcatttggcgaaggtcaaagtcaacaagtttcagaattgagatatattgcaacttctgcaactgctaccccagaattattctataaattatcaagcggtagaggctatttaaagcagtcagacgttgctgtaagtggtaagattttaactcctgttaacactccagaacaagctagagcagacgttacagttgctacagcagctgataagactaagttgcttcaagacattaacgaagcaactagtgttaagaactcagaagcttacaagtttgcttcaagtgatgccaaggctgcatatgatagggcaattacaaatggtactgctgttaacaacgatgctacagctactattgctcaagttaacgaagcagatgctgcaattgttagcgctaaggctaaacttaacggtaagaaaatcactgtatcaagcattagtaatttgactccagcagaagtaacttcaattgtacaattggttgcaactgctaataatgtaccagaaagttcaattcaactttcaaatagtggtgctttgacaattgttactaatggttatactcaagttttaaaccttagtgattatgttactcaaacttcagcaacttcaactaactagaaatgcataaaataagacgtagtatctgaaaggacactacgtcttattttttaggatattttcgttgtactagaaagtacaaatatattctaacttttttagcgattaatagttagtgcttttttatggttgcggcaaaattcttgctataattaaggagaatgtggttctttttagagcaacttttgctaaaatagagctggttaaatatttttacggaggaaattatgtcctataaagacgatatgatgatcttcgcccttaactcaaatgtaccattagcacaaaagattgcggatcgtgtgggtgttccactttccaagtctagtgttgaacgtttcagtgatggcgaaattcaaattaatattgatgaaactgtgcgtggtaaagatgtctaccttgtacaatcaaccagtaagccagttaatgacaatttaatggaattgttgattatgattgacgctgtacgtcgtgcaagtgctcgtacaattaacattgttatgccttactacggttatgctcgtcaagatcgtaagactcgtgctcgtgaaccaattactgctaaattggttgcagacatgcttcaagctgcaggtgctgatcgcattctttcacttgacttacatgcaccacaaattcaaggtttctttgatattccagttgataacttaatgggtgctccacttttggcagactacttcttgcgtaacggcttagagaaagacgctgttgtagtttcaccagaccacggtggtgttactcgtgctagaaagcttgctgaattcttaggttgcccaattgccatcgttgataagcgtcgtccaaaggctaatgttgctgaagttatgaacattatcggtaacgttaagggtaagcgtgctatcatcattgatgacatgattgatactgctggtactattactttagctgctcaagccttaattgatgcaggtgctactgaagtttatgctagtgcaactcatgctgttctatctggtccagctattaagagattgaacgattcaccaatcaagaatttggttttgactgattcaatcaatcaaccagcagagaagaagcttgacaagatgcttttggtatcagttggtccattgatgggcgatgctattaagtgtatccaaaaccatgaagcacttagcccattgttcaacaccagatacgaagctgacaagaacaagtaagataaaatttgataataaaaaatggctagccgatgaggttagtcattttatttttttttgaaaaaatcatcaccatttataataaataagagtgtattaaaatacacatgagaaacatctataattagagatagatgtttttcatttaaagaggacaaaattatgacacaatatttatcattcgatattggcgggactaacttgaaatatgcattaattgatcaagaagggcatattcttgaaaaagaccgggtaaagactaatactgaaaacctagatgcattcatgcagacgatgtatgaagtcgctgacaagtatcaaggaaagttcgctggcattgcagtctgtgctcctggtaagattgatactaagaataaaattatctattttggtggagccttgccattcttagatggcttgaatttagaagagactttaggtaaaaaatatgatgtaccagttggcgtagaaaatgatggtaaagcagctgctttgtcagagcaatggctaggcgaattgcatgacgtcaatactggtatcgcaattaccttaggcactgctgttggcggcggtgtcatagttgataatcgtattttacatggctggacttttcaagctggcgaattgagttggatgattacgaattcaagtattggtactaggaatatggctgcttatgctggctttagttgttctgcggttaatatgatcaaaaaagttaacctggctttggggaatatcgatcttgataacggcttgaccgcgtttgaggcaattaacaatggcgatttaagagcactagccgtttttaaacgctattgccgcaatgtagcaatcatgatcctcaatattcaggcagtaatcaatggctctaaagtaattattggtggcgggattagtgcacagccaattttgattgaagaaattaacaatcaatttgataaaattttgcagaataatccaatgttgaataatcaagtgattaagccggtgattgtggctgctaagcatggcaatgattctaacttatatggtgcactttatgcattactgttggaattaaatgacgaagaagttaggtaaatattgcaacacaaaaaggggatgcgtcgcatcccttttttacatgagctaaataataatttaatctttgccagaaacaatcttggcaatcgcaatgctggcaccagcaacgcaagctaccatggcggttttacaaccaatcttgactacgtcttttaccaaatccttattttcatgaatgaagtcaaaagacattttagtatagtccatgcaataaccatgaactgtgtccatcaagtctttaacttgagtatagccgctcttaggttctgcctttacttcatcttctggattaatttgagttcttacatctgtatttaaatcatttctgttcatcataaatacctcgattctaggatttaccttaattttacttcttttgctcacgttttggtcttctcaaatatcttaaggcaccattcttaatatatttttgaaattgctcataaagtggatcgaaaatttgcggctgatcttcatcgtgactgagcatagttttagggaagaagaagcgttcatctccttggaaagtaccatttaatgcgcgaaccaatgggctgagttgggataactcaatcatgctgccgtcgtcttgcataatttcaatttgactattagcatttttccccgttggcttataagcatcatatggttcatcgaatgcggaattggtagcggtatagtaatcaggattaaagccagcttgcttgattaggctcttgagcttaggtaaaagatttttggtttcttcatcgattcggacactagctagcggttttctgtacaagtaacgcttggctaggtcagataagattggatcttgtgcctgggtccacatagaaaaattagtttccattactccatcatcaagctttaaataatcgtctaaagtccaattgccttcaaggaatttagtcaagctaggtgtaacttgcagatttccctttttataaacagtttgagcgcgctctaaaaggtgatgcaagatgacttccattgagcgtcctacgcggtggaagtagacctgttggtacatctgatagcgtgacacgatatagtcttcaacggcatgcatcccattgttggcaaaacaaataccattttgataaggacggattacccgtaaaattcttgataaatcgaacctaccatagttaactccggtgaaataagcatcccgctgcaaataatccatccggtcagcgtcagcttgacttgagatcattttaaccacttgcggattaggataagtcttagcgattacgctggcgactaattcaggaaagttaggtgcaacttgttttaatgcatggttaatttctgtattaggatcagtaatgatcttttgtccaattttttcatgattggtgccaaaaaggtgctcgaatgtgtgcgaatagggcccgtgaccgatgtcatgaagcaatccggcacattctaccagtaatcgattatcatcgttccagagaccgtctcctggcgtaattgagggatattttttgctaaagatatcgcaaattcttctcgttaattcataaacgcctaagttgtgctcaaatctagtgtgagttgcacctggaaaaacatagctaacaggacctaactgtttaatgcgacgcatgcgttgaaattctttagacttcagtatgtccaaaacaactttatcttcaatatgaatatagccgtgaaccggatcacggagaacaacctcttgttttaatttttcgctttgaaatcttgtcataaaaatccaccaagtttaatttattaattttttgaactatatataataaaatagattatatctaactaaaattatatcagagatatagtaataatgtttaaagggggcgcttgtttgacagcaattacgattgatttgactagtaaaattactcaagacgatgagacagagacttttacgcgacatgcgcaagggcaattgactgaagaaggcgacgtcacacgaatttcttatgccgaagaagggcaaattccagtgaagatgcttctaaaggagaatgaattgttgattcgccgcggcgttgacagcaataattattctttaatgaaatttattccgggtgaaaaaggcaactgccgctatgtagttgaagggcgccgcatggacatgaccagcgtgactaacttgcttgaatatcagagtcaagatgatggttcacgtaaacttcgggttgaatatgacctctttaatggactatacttaataggtaactatgcagtcacgttgatttttacttaaaggcctagtagaatagtaaagattgtataagagaggacgtacagctgtgggattagacaaatttaaagacaaaaatcgcgatgaattgtcaatgatcgaagttgctcgtgcaattttggaagacaatggcaagagaatggcatttgccgatattgttaatgccgtacaaaaatacttgaataagagtgacgaagaaattcgtgaacgtttaccacaattttatactaatatgaacactgatggtgaatttatctcaatgggtgaaaatgtttgggcacttcgttcatggttcccatatgaatcagttgatgaagaagttaatcaccctgaggatgaagaagacgattcacgtaagcaccacaagaaggttaatgccttcttagctagcgctactggtgatgatgacattatcgactacgataacgatgatccagaagatgacgacttagacgccacagacgatgatactgatgatgtattgccagatggcattgaaggtcaattgtcacaattaaatgatgatgatgatgatgacgaagaagataattaatttgcttgacttaagaagaaaaagcagataatatttttgttgggcaccctatgtgcgtttagctccccgttagtgggagcttttttgtttaaaggataagttaaaaggagcagaacatgacaaaatacatcttcgtaactggcggtgtcgtatcttcacttggtaaagggattactgcatcaagtttaggtcgacttcttaagaatcgtggcttgaaggtcactatgcaaaagtttgacccatatattaatattgacccaggtacaatgaatccataccaacacggtgaagtttatgttaccgacgatggtacagaagctgaccttgacttaggtcactatgaaagaatcgtagatgttagaactagcaagtattctaacgtaactactggtaagatttaccaagaagttttggaaaaagaacgtcgtggtgactaccatggtgctactgtacaagtaattcctcatattactgacatgatcaaaaagaagatcatgcgtgcagctttgactactgattcagatgtaattatttctgaaattggtggtactgttggtgatatcgaatcaactccattcatggaagctattcgtcaaatgcgccgtgaagttggtccagaaaatgtaatgtacattcactgtactttggttccacttcttcacgctgctcatgaaatgaagactaagccaacacaacactcagttgcggaattgcgtagtattggtattcaaccaaatatgctggtacttcgtgctgaacaaccaattgaccaagaacacaaagacaagatttctacttttacagacgtgcctgttgatcgaattattgaatcaattgatgctccttcattattcgatgtgcctttgaacttccaaaagcaaggcatggatcaaaaagtctgtgatttcttacacttagagagtccaaagccagaagctgacatggaagcttggaagaagcttgatgaacgtgctaagaccttgaagcatcacactaagattaccttggttggtaagtatgtagagcttgaagacgcttatatttcagttactgatgctttgcaacatgctggttatctttacaacactaagattgatgttgataaggtacaagctgaagacgtaactgaagataatattgcagaaatcatgaaggattcagatggtttgattgtccctggtggttttggtactcgtggtcttgaaggaatgattactgcaattaagtatgctcgtgaacatgacatcccattcttaggtatttgtttggggatgcagatggctagtgttgaatttgcacgcgatgtattaaaccttgaggatgctaattctgcagaagcagagccaaactgcaagaataatattatcgacattatggctgataagcgtgatgaagaaaatattggtggtactttgcggttaggtatttacccagctactcttaagaagggaactaagactcgtgcggcttacgatgatcaagatgttattcaagaacgtcaccgtcaccgttttgaattcaataatgaataccgtgaagcctttgaaaaggctggtatggtcttctcaggcgtttcaccagataaccgcttagttgaaattatcgaattaccaaagaaaaaattctttattgcagcacaatatcacccagaatttttgagtcgtccacaacgtccagaaggcttatttaagtcatttattggcgctgctagtggtcttccagcacaagaattttaaagtgattaaagtttgattatacaaaatcttaagaaaacaagaactgagagacctcagctcttgttttttttgtaaatatcctttaacattattatgattaattgaaagtagaaaaggatttgttttcgccaatgaagcagatgataattcatggtggaaagcccctgcagggtgatgtttggatcggtggagctaagaactcaacagttgctcttattccggcatcaattttatcaagaacaccagtgaccttggaaggcgtcccaagaatagctgatgtagttaacttgatggacttattgagtgagatggatgtacattgtgatttcggtgaaaccactttaagaatagatccaactgatatcaagatgagtccgttgccagctggtaagattaagagtttgcgcgcttcatattactttatgggtgcgctacttggtcgctttggcaaggcagtagtgggcttccctggtggtgacgatattgggccacgtccgattgaccaacatattaagggctttgaagccttaggcgctagcgtaaaaaatgaaaatgatcaaattataattactgcaccagaagatggtttgcatggagcaaaaatccatttaaagatgccatcagttggggcaacgatgaatattattatggctagtgtgacggcacagggccagactataatcgaaaatgccgcaaaagaaccggaaattattgatttagctaccttcttgaacaatatgggggcagttattcgtggtgctggtactgactctattcgaattgaaggggtggagcagcttaaagcacagattcctcatacgattattccagacagaattgaagcagggacttatgttgctttagctgcctgtattggtaatggcattcgcattcataatattatcgaagaacaccttgattcatacctggctaaagttgaagaaatgggtgtagtaatcgattcagatgaagattctttgtatgtttacccagcgggcgacctaaaaatggtccaggtgaagacagatgtttatcctggttttgcgacagatttacagcaaccaattacaccacttttattaactgctaaaagcggtgaaggtgtagtaatcgataatatttatcctaaacggattggtcatattgctcagttgcaaaagatgggagccaatattaaagttgaagataatattattttggcccatccaactaagcagtttcatggtgcggaagtaactgcaggtgagattcgagcaggtgcctgtctgatgattgcaggcctgatggctgatggtacaacaacgatcgacaaggctggtaatatcttgcgtggttatgatcgggtccaagaaaagctgcgtcaacttggagctgatgtaactatcaaggatgatcctgctgtaccgggtattttagataatatttagtaaataaaaaccacatggaaaatctccgtgtggtttttgtaatgatatgtcgatttgtaggtgaacaaatgagtttaatttttacaagacgtgcacaaaattcagatgtggataaaattgtgcaaattttaaatgatgcgacttcttttttaaaggaaagtggctcatcgcagtggcaaagtggctaccctaatcgagcaactgtagaagatgatattaaaaatgggtgtgcttgggtattaactgtggataatgaagttgcaggttatgcggcagtggtaattggccgtgagccaacttatgcggatattgaaggcaagtgggaaaataatgtggacacctatgcgacaattcaccgcattgcagtttctagtaagtttagaggaatgcatttgagtcaatttttcttgagcaatattatttctctaacttatgcacaaggaattcacaattttagaattgatacaagccggaaaaataaaattgtccagcacattgcagttagtcataattttattgaacgagggattattcaagtaactgaagatccggttgattcaagtagaatagcttacgagttgaatttaaggtaatgaaaaaccacatgggatgtgaattccatgtggattatttttttgctttatttattaatcaagcaagtcgtatttcaaagtcattaaaccatgaccttcgtcaaccatttgaccaagcagttcaacagtgttgttataaactgtatcagacatcttttgattagcagcaattaacttgtcttgtaattccttacctgaaaggttctttgcttctttgtcagtatcatgttggatcttgtgacattgtgctaaactcttttgttcaaaggcgtcttcaagttcaccgtaaacacggtagttggtatcgcctaattgagcagttaacttgttaagccagaaaatcttgctcaagttaaacttaggagtggtttgccaagcttcaggggtagtagtgatattagtatagaatggcaccattgagttaaaggtgttaggaccaaaggctaaccattgtacacctgcaatttctgcaggaacatcattacgaatttgcaaaatatgggtttcaaagtttctgttaataccgataggacggaaggtcttcttttgttcaggagtaccttgatcgccataagcatcgtaaggagtgtcttggtagtgtgagctttcggcccatttaatatcttcaattgagattaaacgattagcatggcagataaaaggttgatcttgatctgctggagtaccaccaaagtctggatcgaaatagttgtgaatataccaagcacgaggattattgtagtgagcatccttaatagttgaagaaccaaagatgtggcgcatgttgtagccttcacggtctggattcaagtgatattcttcgattaaatcctttaggtctgctgaacaagcaaaattatcagaatcgttgaagtcgaaagtatcaatattcaaacggtttggtgcaataacatatgcatcatctgggatacggcgtgcaatccaatgatgaccaccgatagtttcaaggtaccaaatgttatccttatcagaaaaggccataccgttcatttcataagtaccgtatttttcaactaaatagccgacacgtttaacaccgtcaaaagctgagtgcaagtatggtaaagtcaaagtgacgaaatcttcttcaccaagaccaccttcacttggatcaagtaatgggtcaacaccttggatgcgtgaattagtagtgatggtttcagtagcggtcatggctacattttcagcgttaattccagctgcgccccaaataccatttttgcctgaaacatcaggtgctgaagtatagcgtaatggtgtttctgctaaatcagcgtcgtcaatcttttgtttagaaattacactagtgtagtgcttaggttggtcagctgggttaacagctttaaagccttcagggatgatgacgcgaccaccgtcttcactacgagcgatcatcgtagagccatcaatagttgcttttttaccaactaaaatagtagtacattctgtttgtttcattggatcagtcctttacttttattatgtttaaattatttcctaataatattgtatgcaaaaataatccgataaggcaaagaatataattaatttccccgaaaggcatttggactaacaccgctatagcgtttaaatgccttggagaaggtaaattcatcgccgtagccgacttttttggcaatttgctttagattgtgtgtggtattagttaattctttcttagcggcttccatgcgcaattgcatgaggtacttttgcggcgataatttagtgttttttctgaacaaagcatataaaaagctgcgtgatactcctagcctatgacagagttcgacaatattgcaggtaggatcggtataattttgcttgagatagttaatggcaatttgatactgatcatttttcgatgttttgcggaccggtggatggttaggaaagtcttttactagatgataaaaaagttgataagttaaagctgaaatttttaaattgtttaataaggtctttttcttcgccaaacattgataaaggtcatctagggtttgataaaaggcagttttttgaatttgacgcaagaaatttttattaggtaaatttgatgccttgatgctttcattaacgccgttgccagctaggccaatccagaagtattcccagggttcattgtggtcagcttgaaaggaacaagtttgactgcgtggaacgtaaaaaagatcgccagcttttaatttaactgcgtggtgtctactagaagtaaaggtaccagttccgctaataatgtaataaaaaatatcgtttttacgaagattgtcaccttgaaagaattcatcgggctgacatttttgtcgaccataaaacatgatgtagctatcaagattttggttatttaagttaggcatagacttcctcactgttgaaaaattatgttacttctattatagaagagattttgcttaaaaggtgaagaatgaaaaacgaccacattaagcggtcgttcgtgaatatttatagaaaattatgatatgtggaattataaaatgaaaaggtattttacttattggcaccacttcttccattgaataaaagattgagcagagttgcacagatgctggctacgacgataccgttgcctaagaacaattgaatggtttgggggagagtttggaagatttgtgggtaaacagttacgcctaagcccataccgatagaaattgcgacaattaaaatgttgcgattattttcaaaatcaactttagttaacattttgattccttgaacggcaatcatggtaaacatgactaacatagcgccgcctaagactgaatcagggatgatagtaactagagcaccgattttaggaagtaagcccatggccattaataatccagcagcccaatagatagggcgcttggttttaataccggataattgaagtaagccgacattttgagaaaaagtagtgtaagggaaggtgttgaaaagcccaccgaagatttgtgctaatccttctgcacgataaccttttttgaggtcttcttcggtgatatcttgatgaagtaggtcgccaatggcaaagaagacgccagtggattcgaccaaggaaactaaggcaatgatgatcatggtcaaacaagatgaccattcgaattcaggaacgccgaagtagaaaaattgaggtaagtggaaccaagaggcttgtgttacgggtgtaagtgaaactaatcccatgcaaccagcaatgatagtcccagcaattaatccaattaaaacagagatggagcggagaaatcccttagcccagacttcaatgacaacgatgatgaggatggtgataaaggcagcaataagatttttcgcatcaccaaagtccttggcttgggcatttccgccacccatgttttgaaaggccacgggaatcaaagttagtccaataactgtaattaaggttcccgtaactaccggcgggaagagttttttgatttttgaaaaccatccggcaattaagaaaacaaagattccagcaacgataatcgcaccgtacatggtgttaattgaaaatttttgcccgatcatttccaagggagctaccgcttgaattgcacagcccaaaacgactggcaagccaatgccgaaatatttattacggaatagttgaattaaagtggctaaaccacacatgaagatatcaatcgaaactaggtaagtcatctgtgtgctattgaagtgtagtgccgtaccaattaaaaggggaacggcaactgcaccggagtacattgccagcaaatgctgcaaacctaggacagcagcttttttgtgactaacttctttttgtgccatttttaattattcttctccctcgaagtgtacttgatcattttcaaagctatcgatttttgctagggcttcaaagcgtaagccttcgttttctacccattcgcttccgccttggaaggtttttgcaacaacagcaccaactccaacaatgtcgcagccggcttgtttagcaatgttaaccatgcctttgactgcttcaccgtgggcaacgaagtcatcgatgattaagatatgttcgcctgggtgcaaaaatttctcttcaacgcagatcttattgttgaccttcttggtgtaagaaaagacgtcagcccaataaactgcatcattcaaagtagacggctttttctttctggcaaagatcattggcacgtgcagttggtaggctgccatgacaccaggagcaatcccggacgcttcacaagttaagaccttatcgactttttcatctttaaaaaggcgggcaaattcttcaccaacatgcatcattagttgcggatcaacttggtgattcaaaaatgaattaattttaagcacatttccaggtaaaacttcaccatcttgtttaattcgatctactaattccttcaatattattctcctcaagaaagaaataaggacttcttctacctaaaacaggtaaaagaagtccttaagattattcttaactttcattcacctatagtccggtatttacggtaccgggtagagactgtcgaccttatttcgacgatatatagatatttgtgttggcttaatcttaacagaatatattgccgaacacaagtggaaaattaaggattaatgttcgattatagtaaaaattattcagctgcgatatcgttatggcacagactgatgatcttttcgataatgccatataagatccccgcgattggccagatgatccagctgcgttcccaatcattggtaatgaagctatatcctagataaagtaagactgctattaaccaatagagtgtggcgtatttgttcataatcttgcgacagccggttaattggattgttaaattgcccaggtcaagcataatagctagggcagtagaaaagcaaaggatggctggactgcgaataattaaactaatggctaaagcgcgaaggctggcacttttttgagcagctgttaagtagccttgctcttgttgatcagataaaattggcaattcttcagttaagttattatctttgtggtttaattcaaaagaaggtgagccgcttttgagtaaataatcggtggtcactccaaataattctgataaagctacaattttttcaatatcgggaattgattgttcactttcccatttggatacagcttgccgactgacattcatcttttcagctagtgcttcttgaaaaagatgatttttcttgtgtaatgccgcaattttttgacctaatctcatgattgatcgtcctttcgttttgaaataatttgatttaacgaaaatttgcggttgcagaccaccactttttaattgcatttagcgcaactagtagttgcaactgctggttgctcaagataaaagccgaacaatgaatggctatttttaactttttgattgacctttttaatttttcctagtagagttagttaaaaatgcgtaattgaaaagagggagtaaatagtggctaagaatctagacgattttgataaaattattgtgcttgacttcggtagtcaatataaccaattaattacccgccgtattcgtgacttcggcatctattctgaacttttaccacacgatctttccatggagaagattaaacagatcaatcctaagggaatcattttctcaggtggtcctaacagtgtttacgataatggtgcattaaaggttgatcctgcaatctttaagttggatattccaattttgggtatttgttacgggatgcaattaatgtctcatgacttaggcggtaaagttgaacaagctgaaaacaaggaatatggccgcgccaacattacggttgaagatccagacagtattttgttcaatggcttgccttcaaagcaatacgtttggatgagtcacggtgatttggtaactcaagctccaaagggcttcgaagtaactgcctcaagcaaaaactgtccaattgctgcaattgctaatccagataaaaagttttatggcattcaattccacgcagaagtgcgcaattcagaatacggtttagacatcttgaagcactttgcttttgaggtttgtggtgctgaggctaactggaccatgaacgacttcatcgacatgaaggttgatgatattcgtaaggaagttggcgacaagaaagtcatcttaggtctttcgggtggtgtagattctagcgttactgctactcttttacacaaagcaatcggcgatcaattaactgcaatttttgttgatcacggaatgctgcgtaaagacgaaggcaatcaagtaatgcaagccttgaacaaggatcttggtgttaacatcattcgggttaatgcccaaaagagattcttagacaagttgaaaggtgtaactgatcctgaaaagaagcgtaagattatcggtaaggaattcatcgaggtctttaacgaagaagctaagaagttaaaggatgtagatttcttagctcaaggtacgctttatactgatgttatcgagtcaggtaccaacactgcccaaacgattaagtcccatcacaacgttggtggtcttcctaaggacatgcatttcaagctgattgaaccactgcgtaagttgttcaaggacgaagtacgtgaacttggtgaaaagctgggcattccacatgacttagtatggcgtcagccattcccaggccctggtcttggtatccgtgttcttggtgaagtgactgaagacaagcttaagattgtgcgtgattctgatgcgattttacgagaagaaatcaagaaggcaggtttacaagaaaagatctggcaatacttcactgttcttccaggtattcgctccgttggagtaatgggcgatggacgtacttatgactatacgattggtattcgtgccgtaacctcaattgatgggatgactgcagattttgcccaaattccatgggatgtacttggtcacatttcagatagaatcgtcaatgaagtagataacgttaaccgcgtagtttacgatgtgacgagtaagccaccttcaactattgagtgggaataatttcgtaccttaataagaagaggaaatcccaatatgacggcatttgaatagggtcaatattagtggaaagtaccggttgaaagcaagttgtctaccgtttttctaccggtagaagttgattttaatcagcatgaatagtgcattaaacgctactattacctgttcgttattttggggttgtctaccgaaaattgaatattttgcttacttttgttgaaaagtaagtgactgttgtcctacttattgtcatttgataagtggggcattttttttctctttgttgccacaaaagaaatgctgaaatccaaacggagcagtctgtttgatcgttgttgttacttatgacgaaaacataagtaaatcagatatgaaatctcgaaatgaccttgaatgaaatctcaaggtactcattctcgaatgcaatatctgatcggtcgcaaccgaaggctgaaaatttattttgccgggacggcaaacatgagggggtcattgcacgatgaagccgttaaaggatgagctaattcaaagtcgacttgatgaagatgaattagcagattttgataaagtgaagaaactgctcgatgtgaagagtaattctgttgcaattcggcagatgattaaagatgaaatgagaaagccagaaatgaatggaagcaaggtaatactgacgttgtatcagcgttattaaccaagctgtctgctgaaggtcgcctaccattgtcagaggcgttgatgggtattacaggtactaaaacatcatcacaattgagtatcttacaaaatcagttcgccgatattcaatcacagttagaaagtattatgtattcagtgacaaaaatggtcgattgaacaagtggctcatgtagttagaatcgcctacaagaccatctacaactggattgagcaaggagtattggatattggcgtggctgatttacctgaccatggaattcgccgccgacgagccaaagaaacccgtgggacttttagccatggacgttccattgaagatcgtcccgctgaagttattgaccgtcatacctcaggtcactttgaagcagatacagttttatctggaaagcgtaaaggtcaagcaatagctacgtttgtcgagcgtaagagtcgtcttatcatcgttaaacggcttcagggacgagatagtacctcaataaccaaggccattttagaattagctaaccagttagaagataatctcaagccccttactgttgaccatgggaaagaattcgctaactacaagctaattgaaaagcaggccaggattcccctatactttgcgcatgcttattctccacatgaatggggcagtaatgagaatcgcaaccgagtactacgacgctttatcccaaaggtcaaccgattgagaaaatcactgatgatgagttaattcaaattaactggtatttgaactccaggccactcaaatgtttaaactggcgcacactaattgagatctttttgcgtaatctgcgtcactaactttgttcaagttatttcttgcaatctgccgtttgaaaagagattagccttggcggttagtctcttttactatctggtaagttgactgcaaacagaaaaaagagccaagccgtcatcaaagtcgctaaaccgtgctataatgttgtcggatttaaaaataccactagttattaaatttgggaggcaaaaataacgatgaagcaacttaaatttttagaaactaagcggacaccgcgttatagtttgcgtaagtttagcgttggtgtggcttcggtattattaggagtaaccatttttggaattaactttacaaatcattctgtaaaggcagcaaccatagaaagcgttaaaacttccaatagttcaccagagacgcaaggtagtgcaagtaacaatgcaacagctaataattctacagaagctgcgacaaccccacaatcttcaccagaaacgcaaggtagtgcaagtaacaatgcaacggctaataattctacagaagctgcgacaacctcacaatctttaccaaagacgcaaggtagcgctcacacttatattagatcattagcagcaagatcagcagcaagattagcagctacgaattttatggtaacttctggttctgacagaaatgcagcaggtacagtagatcaaaataacattaatactcagctagctaaagaaaatcaagaattggccaataaggctaatctaacttcttcagataactacagttctaatatctataaaggtacagatggaaattattacaagattgtaactatttatggtcaggactacgtttaccgtgctgctgatattcaagctagtggtgctgattttaagggggatcctaaacaaacagctgaagatactaaaaataatatcaatatttctaaagaagatttaggaaatggtaagacccgttggaaggttgttttcttccctaataagggattacaaaatgttggcagtaaattaagtgggttaagttctgcaaaatttggtattgccctcacttctgactaccaaatcgttggtaatgttgacatgaaagtaattagtaatcctaatcaaacatttgaatcttatacatttgagcccggtagcactagcgctactgaatttccaatacaaaatctaaaaactgaaaaagacttttcatttaatcctaagacagatgttgatccaaatactggtttaattaatagtgaaaccatgccagcttataacaatcaatatttgcaaggcccatactatttcactactgctactgatgttggtgctaagaacttatggcagacttactttaaagatgctgatgaacgtaagaatgcatatgatgggtccccttatctaggtggcaatcatgactttcattttaatacttttaaaattgcaaatgaaactggagttgacggtgcaaaatataaagacccaatcatttatgacaaactggggtataggttaaattctaaaaacggtgtagctaattctaatggcgtatatagcagtgataactttaaccaagcaatgtcatttaagtcacaaggtgtcactagtaatgcacaattttcttcttatgttatttcctttactacgcaacacacagactctcatgaagtagaattaactacaggttcgaaaaatcaacaattctcaggaatcgcagctaatatttattcttatcagaattggtactatagcatgatgtctagcttatatggtgagcagagagcactggatccagctggtgcaccaaaaacacctaaagatgttatttctggttgggttgatgccactagagctctggatgagattaagaaagactatttaaataatgctcaaattaatgttttgcggaataaaattctaaataacattacagactctgatgctgtaaataacattattaaagaaggaaattccttaaacgatgctatgaaaaatcttggtaatagtatcggacagtatgatcctgatggcagttttgctgatcacaaggaagatacaacaaagaaatctgatcgctataaatacgcaagtccagataaaaaggcagcttatgacaatgcaactgaagtaactaaagctttgattaacaaagatacaggtacctatgcagatcaagcgacggtagaacagcttactaaagatgaaaatgatgcttggaacgaacttaatggtgtcaagccaaaggataatgaggttaactctccggtcggtggtaccattactattgaaaagggacatgcattagattcaactgatgccgctaatgcaattaccaataaggatagtttgactaatgtaaaaagttattcttggtcgggtactccagatacaagtaagccaggatctattagtccaaaagtaatagttacatataatgatgatagtgctgatgaagtacctgtaactgttaaaataaaaggcgatgctgacaagtacaagagactgtaaaatagtttgtgtaaggatgaatgattccttaaatttatttctttaaacattagaaaaaggagttcctttctcgtatgattggtttgaacaaaaaaaacacatacagaaagaagaactccttcatgaatgcaatgtcattaagttaagacattgacaaattatcgacttggacttttaagatcattcatttgcgatttatcgcatttgaatgatcttttttcatgccaaataaacccaaatcttgtttagaaattaggctacacgatataaataatatacagctgatttgggtttgagatttcttttgtcttttcgtcctggtctgatcggaattgtgtaatgactaatttgaataagaatctttttaaagatttcagttgaagaagaaattatatacatagcctggatgacaaaacatgactgtttgaaattgatcgcatattgatacttgcagtttttttgtggtacatatgcttgagcatcaatttgactgactgcgttaaacataatcatgtgggcatagatctccatttcaataaatctatcctgcttggaatgaaactgtacgctacctaaagcatatttcaactttttgaatgaagtttcaatgccccagcgcaaatggtagatttctttgatcctttttaagggataatcggctctatttagattagttagaacaacttcccattcttctttgcctgatttaggatcattaattctaaatttacaggcacgaaattttattgtacataactctccaaagtcccagctgccatctttggtatttttagaccgatattttatatattgacggtaatgatggttaaccaaatgaacgttttctgtagccttatgggtttcataataataattagaggtagtcacccagcaagctatatccttatcacactcttgattaggcaactcagctacttccttaaatgcgccatatcccgttttagtacgtatgacataataacagttaggcaggcgattacaattttcaatcatgttaaagccggtataacctcgatccatagtaactatatatggtccgcaatttagctttttaagcatttgaacggcggctttacgttcatccatctttgacttaggctgaaagatgcagtcttgataagtattatttaacaggtcatagagtgcattaacatgaatttggcaatatggctttcctttatgattgagatttccaacgatattctctgatttaggattccagatttgattaaaatcagacccatcaatggcaaatatacgatatttatgatcaaataactggatattaaataaattctgattaaatacagttagaatatgcttaaaacatgcgggtgaaagctgacctttgcgttggacataagcggaagtactgactactttatcgttatttttaatagctttttggccaaaagctctaaacaactcactggtcaaatcttttccttgcatattaatagtagttttaatgactgtagctgcatctaaaaaccgcttcctagtgaaggcatgaggatcatcgataaaatcatgaatatgctttccagtatcattgataatttgatcaagacgatctaaaatatttctgtgaagggctttcataattaacaccagctttctggcaataattttgaaggtttaataatttaatcagagggcgaaaaggtaggttcttttcgcctttattttatgcaaaaaaagaaccaaatcataatgattcggttctacagagattagattcaatttgtcaatgtcttaacttaatgacattgttcatgaatgattttaccaaagattttgctcaagctctattcaatccagacaaaataaatgatttattgcgcaaagagctacaacaggctgttaataacttgctagaagctgaattgactgcctttctaggctatgatccctatgccagaaatggctggaatactggcaactctagaaatggtgcttatttccgcaaagttgatacgcagtttggaccaattgaagtgcaagtgcctcgggatcgcaacggtcaatttcatcagcacacgctgcctggctacaagcagcactcggatatcttggaaagcatgattatcaagctttactccaagggcgtgaccaccagggaaatagccgatctaattgaaaagatgtatggcagccattacagtccagctcaggtatcaaatatttccaagcagatgattccaaaggttgaggcttaccacaaacgcaagctaagcgacaagtttttctgcgtctatttggatgcgacataccttcctttgcgccgagaaacatttgagcgtgaagcagtctatattgccattggcatcaagcctaatgggcacaaggaggtcattgactactgcattgcacctagcgagaacattgaagtctggacagatatgcttcaaaacatgaaatcccgaggcttaaagcaagttgagctttttctttctgatggtgttgttggcatgaaaacagccttggccaggacttatcctaaagctcattttcaacgctgtttggttcatgtcatgcgcaatatctgcgctaaagtacgcgtcgacgatcgtgaaaagatcatgaacgaattcaaacaggtgcatcaacagacaaacaaagaagaagccacagctgtcctgcatgacttctataccaaatggggcaaggtttacagccatgttatcagaagcttgaaagacatagaaccagatctgctggtcttttataactatcccaagcagatcagagcttcaatttattcgactaacatgattgaatcatttaacaatgtgatcaagcgcaaagctaagcctaaggcagagtttccaactgaacagtcgcttgatgcttttattggcattcaggcaatgagctacaatgaccgttatttcaatcgaattcataaaggctttggtcaggttcaggacaccttagaatcctactttgattaaataaataattaaaaaatcaatttacgagaaagaactatttacacaaaagatttgacagtttcggaaaaaatcctaatgaagaaacttaatatattttattatgctaccatttggagttttattattggaatatgctgtgctacatatttaaacttaattaattttattattaattttgtctggcatgttttgtttgataaattacctgttcctagtcaggctttaccgttttttatttgtattccttttggtttcattattggtatattaattaagcgtttaggatcatatccattaactatcgaagaagttttaatgagtgttaagcaggagggaaagatcaattatcacaattggtggaaatccttaaccttaggtcttatttctttagccgcgggtggcagtattggaccagaggcttcaactactgtactaggaagtggcatggttaattggctgggagatagattacgactaattgcttattcttctgattggaaatggaatcatttttgggatactatcgtttcgaaaaaacaactaaaaaaactgccaaaatttagtagcctttttaaatcaaaattgtatcaaaaagttttttgcttaattatggttatgatcggcgtggttggtgcagcaatagtctttaaattattccctgaagaaggattatttggtattcatcatcgccatattctctggcaatggcgctatagtatgtatgtaattattctattaattgtaggttggagcttcggtatgtttttcttatggagcgaaaaatggagtgattattttgctaaaaaaattactatttcaccgattattaaagcaactatatggggaatagttcttgcattacttaccttaattactagttatgccctgtattctggtgaatttcaaattgttccatttgtacaccaggcgttgcaaatctcaccattatttttgctagttatagcagtcatcaaaaccttgtctactaatataggttttagtttaggctggcgtggtggaaaaattttcccttcgatttttgctagtgtagcagttggcgcagcgattgcgcaatttttaccaattatgccagttatgtgtgtagccattacagttagtgcaagtattgcagttatcttgggtaaacctttattaacagctattttattgattctgttattaccaatagagttggctcctgtcattttagtaagtgcgtatttatctgcctgtttgacaaaagtgagctatagttttagacaaaagaataattagggaggtatttttatgaacgaaaaaaacgatgcagtaactggtgcttctttgatagagaatcaagaagaaaaagtaaaaagcccatggccgggtcctaaaggtatgattcctgtaacaagtgggcgtgctgacgatgctaatgtacataatcgtgcctacttagacaatatcttggtggagatgcgtttgcttgattcagttgagccagacttaacaactgagatttttggtaaaaaatatgcctcacctttaactctggctgcagtctctcatttgaacagggttttaccagataagacgcgtaagccaatgcaagaaaaggcacgtgcggctaagaataccaatactttaaattggattggcatggagtcaaacgaagaatatgccgaaattgtcaaagagggcggcgatacagttagaattgtgaagccttacgcagaccatgataaaattatgggcgaactaaaacaagcagaagaattaggtgccgtagctgttggaatggatattgatcatgtgcctggtgataatggtaaatatgatgtagtcgatggtattccactaggaccgatttcatttagcgatcttgaaaagtatgttcatgcagttaaactgccgtttgtggctaagggcgtgctatccgtgcgtgatgccgttaaggctagagatgctggtgccaaggcaatagttgtttcacatcaccacggccgcgttccatttggcgtgccgccactaaaagttttgccagcaatcaagcaagcactaaatggcagtggaatgaccatttttgtagatggatcattgatgactggctacgatgcatacaaggctttggccttaggcgcagatgctgtactgattggtcgcgggattctttctgaattgttaaaagacgggcaaaaagcaacagaagataagattaagaaaatgaatgagcagcttgcacaaatgatgttatatactggcgttaaagatactaagtcatttgatcctagtgtgttacattttgattaggatagaaaaatgaaatagtttattttttacagtttactataattaagtggctattagcctataataaaggcgtttaaagctatactgaatagtgttatgcttaactcggacgttgttataaggtaattatttaaaagtaattagttgtatacgaaaacatgcttagctctggtaaaagctaagcatgatgtctcataatattgagccgcttgtagattatactacaagcggttttattttagatgaaaataacaagttttcaaaaagtgagtatctatgttttgctattatggaaatggattgatttagaaaatgatgctattgaaatttcattatgagcggggatgcaaaaccttttttaaaaagcataagaatgagcaaaagataattaagcagttaatcgatcaagcgattactaaggaattggcaactggtatgactaaagtgaagatcgctgcaatgactcggattgagggaaaatcaatttacgagtttcgcctaaatttgaaaaaagcgggttcagcgagagtcgcttttgcagtaaaggatgagcaagtactagttcttttgattacctctaatttacagaaggatagttttagtcatgaattagaaactgttctgaaaggaagtcattatgcgtttaattccaattaagcaggcagagactttgctcaaaaaaatgtgtagtaataaaagtaaatatgtagaaattaaattattaacggcaaaaaaggatcgttcaattagtgtgaaaaatgatggtaaaaagctaattttaactgaagatggctatttgaactttacgcaggaatatgaattgactgatccagctgttggccgtcatgcagttttagcggcttttaaaaaggaatttccgcgtagtaatcgtgcgtatctgattgctaaatggtatactttaactataagaaaaactatcagtgttgatcagaaaggaagtctttttatcaatgaaatatgcagaaaaatctcccgcattatgggatgccattcatcatgaagaacagcgccaacaagacgtcatcgaattaattgcctctgaaaatattgtttctgatgcagttcgtgaagcacaaggttctgttttaactaacaagtatgctgaaggatatcctggtcggcgttattacggcggttgtcaatatattgatcaagttgagcaactggctattgattatgcaaaaaaattgtttaacgcaaagtttgctaatgtgcagccacactctggatcacaggctaacatggcagtttatcaagcacttttgaagccaggtgatgtcattttaggtatgggaatggatgctggcggtcacttgactcatggatccaaggttaacttcagtggtaaggaatataagtcttacagttacggtctaaatgttgagactgaagaactagattttgatgccattcgtgaaattgctcttaaggttaaacctaagttaattgtagccggtgcttctgcgtacagccgcatcattgattggcaaaagttccgtgaaattgcagatgaagttagggcatacttaatggttgatatggctcatattgctggcttagtagcaaccggtcaacatccaagtcctgttccagtagctgatgtagtaactacaactacacataagaccttgcgtggccctcgtggtgggatgattttgtccaacaatttagaaattggtaagaaaatcaatttcgctttgttcccaggcattcaaggtgggccacttgagcatgtcatcgcaggtaaagcgcaagcattttatgaggacttgcaaccacaatttacagattatattaagcaagtcattaaaaatgctaaggcaatggcagaaacttttgctgaatcggacaatattcgtgtcgtatctggtggtactgataaccatttgatgattatcgatattactaagactggtattaccggtaaagatgctcaaaatttactcgactctgttcacatcactaccaacaaagaatcaattccaggcgatcaacgttcaccatttgttactagtgggttgcggattggtacgccagcaattactagtcgtggctttgatgaagcagatgctaagaagactgcggaaatgattattgaaattttatctgatccagaaaattccgcaacgattgctcatgttaaagaagaagttcaggcattaactaaaaaacatccaattgaataatttgtgtagcagaatttagccgtcctagttctcagctggggcggcttttgttataataaaaaattaaaaataatggagttaagagtgaaggaaacgtgattatttggaaaaattaaaaagacataaaataggcttattttcagcgattatgctggccttgaattctttaattggttcgggttggctttttggttcaggttctgcagcacaaattgcaggtccagccgcaattttatcttggattttaggtgcagtaattattatctcaattgcattgacttatgtagaattaggttcgatgtttcccgaaagtggcgggatgagtcgatacgctcaatatagtcatggaccgttattgggttttgtggctgcttgggctaactggatttcgctagtcacattggtaccaatggaagccgtagctgctgtgcaatatatgagttcttggccctggagctgggctaactggactaaaaattttattaaaaacggcagtattacttttgctggtttaggtgtggttattatttttatgctgatttttacaatgatcaatttttggtcagttaaaatcatgacccattttaccaatttgatttctatttttaagatcttattgcctactttgacgattatagttttaattgcttcaggttttcatggacaaaactttggcagtaatttacatgaatttatgccttatggtagtcggtccatctttgaagcaacttctgtttcaggaattattatgtcttatgatgcctttcagacggtcatcaatatgggtggggaattgaaaaatccgcgtaagaatattgtgcgtggggtattgatctcaatgttaattactgcggcaatttacattatgttgcaagtgacatttattggtgcagttgagccaggcatgttagctaaagtaggctggcatgggatcaactttacctcaccatttgcggacattgctattattttaggcattaattggctagtaattttgctctacctagatgcatttgtttcaccatttgggacaggggtagcatttgtagctacggcctcaagagccctagcggcaatgacacacacacgtcatttgccaaaatggttaggtagattgaatcaaaaatacttaataccacgttatgcgatgattgctgactttgttttggcggttattttagtaagcttatttagaaactggaatttactagcaacagtaatcacggcctcaactttgattgcatatttgactggtccagttacggtaatgactctaagaaagaaaagaccagatcttgatcgtccatttaatcctggttatatgaagtggctagctccagttacctttatactaactagtttggcaatttactggtcaatgtggccaacgactattcaggtgataattgttattgccttgggtttgccgatttatttttattatgaaattcactaccaacattcaaatttaaaagaacaattacatagtagttggtggatgatcggttatttgatttttatgtcacttatgtcctttgtgggcagtagcggttttggtggtcagaactggattaagtatccatttgactttgtagtaattatcattatttctctcgccttctattattggggaattaagacagggttaaagaaaatcgatccttatgctgaaaaaattgcgcaaaataaagaataagtaaaaaaactgttgggatttttggtctcaacagttttttgttcgctattctgcttcatcaagatacttatttagtaccttgaaaacaccgttgtcgttattagtaggtgcaataaatttagcagtctttttaacgatatcttgaccattagccatggcataacttaaaccagcaaatttcaacatttcaaggtcattttcaccatcaccgaaggcaattaattcacttcttggcacgtctaaataagctaaaaattcctttagccctgcggctttatttacaccttcaggaataatatccatgtagctccaaccactagttgtgacgtggattttttctgtactacggctgttgaagccatgttctaattcatgtcgaatcttgctgggatagtccattgtgatcttagtgtattggtcatcagcaggaattttattaaaatcatcaatttcgatgctattaggataaaaataatgatgggaccgcttgtattctggtggtgtactttttaaaaagtaggagtgcttaacgccactgattaaaatgttttgggctgcaccaggatagcgtgcgtgcaaatattcaataaaatttaggatgcatttttttgaaaagcttgttgtacgaataatttttccatcgcgaactaagaccgcaccattgtcggcaacaaagtcaatagaatcgataaattcgctaaagtcatcagccaaacggccagctgggcggccgctagcaataataaaatgtgccccgtgttgatgcagacgagttaaaatctcgctaaacatttgatgatcgtattgtttttcatcgttaacaaaagtaccgtcaacgtctacagcaacggccttgaagggaagagtagtcatctaattacctcactaaaatttgataccgttaacagtttaccatttcttgcaagtgcttacacaaattatttatattatgtttaacaataaatttgaaatttacgaggtagaaaaaatgacaccatggtgggaaaaagcagttgtttatcaaatttatcctaagtcatttcaggacagcaacggtgatggcataggtgacttacaaggaattattgctcgtttagattatttggaaaatctaggagttgatgcaatttggctttcaccggtctatcaatctcccggtgtggataatggctatgatatttcaaattatgaagcgattgatccgcaatatggcacgatggctgatatggatgagttgattcagaaagctaaggagcatcatatccgaattgtaatggatctggtggttaatcatacatctgaccagcatcaatggtttgtggaggcacgaaaaagtaaggataatccttaccgagactattatatttggtgtgatcctgttgatggacatgagcccaatagtttgaagtctgctttttctggttcagcttggaaatttgatgagcaaacaggacaatattatttacacttctttgcggaacaacaacctgatttaaattggaaaaatccagagttgcggcaaaaaatctacgatatgatgaacttttggcttgataaggggatcggtggcttccgaatggatgtgattgaattaattggtaaagatcccgacaaaatgatccgtgaaaatggtccgatgcttcatccatatttgcaagaaatgaacaagaatacatttggtgatcgagatgtgatgacggtgggcgaaacttggaatgcgacaccgaagattgcagaagagtactcagatccagcacgtcatgaattatcaatggttttccaatttgagaatcaagctttagaccagcaggagggaaaagaaaagtgggatttaaagccgctagacttaggcgaattgaaaaaggttttagtaaagtggcagacagagcttgattttaatcatgcttggaatagtttgttctgggaaaatcatgatattccgcgcgtaatttcacgttggggcaatgataaaaaatatcgggtgcagtgtgctaagatgtttgcgacagttttacatttgatgcacggcacaccatatatttttaacggtgaagaaattggtatgactaattgtccggtaaaaaatattgatgaagtagaagatattgaaagtgtcaatatgtatcatgaacgtctggctgaaggttatgacaaagataaactaattcatgcgatcaatgttaaaggcagggataatgctcgtcgtccaatgcaatggaatgatgagaaaaatgccggctttactaagtcaaagccatggttgacagtaaatcctaactacaaagaaattaatgtgaagaaggccttggctgatcctaattcgattttttatacttaccaagaattgattactttacgtcatgaaaatgagattgtggttaatggtgactttaagttggttcatgatactggtgatgaagttcttgcatattatcgtattttaggtactgaaaagtggttggtggttgctaacctatctggtgaagagcaacagtttacggcgaccgatcgcattaaagaaaacttgcttagtaattatgctgtgcgtaatgatctgcatgatattacgcttaagccttatgaagcatttgcagtggcaattagataagctaaaattaaaaagaacttgaattactaacttgaagatgttattctagttatcgttaatcgattaatctatgatctgtgatatgatcatggcaaaggagtaataaattatgaaacaaggtattcatccagaatttcaagaagtagttttcatggactcagcaactggtgctaagttcttagctggctcaactttgaagccatcagaaactattgactacgaaggcgaaacttacccattagtacgtgttgaagtttcatcagattcacacccattctacactggcaagcaaaagtttgctcaagcagatggtcgaatcgaaaagttcaacaagaagtacggcttgaagaagtaaaccttttatctggtggaagcagtcccattggggctgcttttttcgttagagattatttggcagaatgcatgaaagacagtataatgttttctgtataaaaatgtttttatgggagtaaatattcaatgaaaatgcaaatggcggaaattgccaaggctttaaatactacttgtgaaggtgacaatcaaactgttattacttctgttgcctttgactccagaaagatcacagatggtggattatttgtaccacttgaaggtgaacgtgatgggcacgaattcatagctagtgctattaataatggtgcttctgctactttatggaaaaaggggcatccgaacaagccagaagatattgcggttattgaagttgatgatccgcttgctgctatgcaagagcttgctcgctattatttgcgtaaggttaatccaaccgtagtgggaattactggttcaaatggtaagactactaccaaggatatgattgctgctgttttgtctaaacgctttaatgtacataaaactcaggccaactttaacaatgagattggtgtgccaatgaccatccttgagatgaagccaaatactgaaattttggtgcttgaaatgggaatggacagaccaggtcaattgcatcatttaagtgaattaacccatccagatgtggccgtaattacaatgattggtgaagctcatattgaattctttggcagccgcgacaagattgcagatgctaagatggaaattactgactttttgcgtgaagatggcgaatttatcttcaatggggatgaaccattattgcaagaacgtgctgagaaattggatcaagctaaagcaacttttggttttagagatgaagatacagttcatgcaactggctttaagagttatatgcatcatgctacctttacagttaatgattcagagcaaaaattctcaatcccaatgattggtaaacacaatgtttctaacgcaatggccgcaattagtgttggtcgtcattttggtgaaagtgatgaggaaattgcctcatcattgtctaactttaccccaacggctaatcggatggagtgggaaaaaggcgatgctggagaaagcatcatgagtgatatctataactcaaatccaactgctgttagagctgtattgactagttttggccaagttgaagtaaaagataatgggcgcagaattgctgttttaggtgatatgttggaattaggtaaaaactcccctgaattgcatgctggccttgaggatacgttagatccacaaattattaacgaagtttacttatatggctctgaaatgaagaatttgtatgatgctttacaagataagtatgagccagagcatttgcattattatacacaagaacagacagatcgaatgattgacgatctgaagaatgatattaagtcggatgacattgttgtattgaagggttcacatggaatgcacctggaaaatgtcttggcccgactaagataggagaacaatttttttgaagttttcagaattaggattaaatgacgcgcttcttaaggcaattaaacgttcaggctttgaagaagcaacgccaatccaggaacagactattccccttgctttgcaaggcaaagatgtaattggtcaagcccagactggtaccggtaagacagctgcgtttggcttgccaattttacagatgatcgacaaaaaagaaaaagcaattcaagcggttattattgaaccaacgcgtgaacttgctattcagacgcaagaagaattattccgtttaggtcgtgacgaacatgctcatgttcaagtggtctatggtggagctgatattggtcgtcaaattcgctcattgaaacaccatgtaccatcaattttagttggtacgccagggcgtttgcttgaccacttgaaacgcaaaactattaatttagatcaagttaaggctgtcgttctagatgaagcagatgaaatgctcgatatgggttttattcaagatatcgaaagtattttgaaatatgctaagaaccgacaacagactttactctttagtgctacaatgcctaagccaattttgcggataggcgaaaaatttatggatcacccagaaattgtccgcattaaagctaaggaattaactgctgatttgattgaacaatattttgttcgtgctaaagagtctgaaaaatttgatattatgtgtcgactaattgacgtgcagggtccagatttggctttagtctttggtcgcaccaaacgtcgcgtagatgaacttacgcgcggtttgcaagcgcgtggctacaatgcggcggaaattcacggtgatctatcgcaagcgcgtagaatgtcagttttgaaaagatttcgtgaaggtaagctagatattctggttgctactgatgtagctgcccgcggacttgatatttcaggcgtaacccacgtttataattatgatattccccaagatccggattcatatgttcaccgtattggtagaactggtcgtgcggggcaaaatggaatctctgttacttttgttacgccaaacgagattggctatatgagaaccattgagcaattgactaaaaagaagatgtcgccgcttcgtccgccaacagatgatcaggcattacatggtcaattaaagcaagcaaaaattgaaattgaagatttgatgaacggtgatttgggtaaatatacccaaggggcaagtgagctgctggataactattcagctctcgacttagttgcagcctttttaaagaacttggctaaagatgaggttaaagtcaagattaccccagaaaagccgttaccatacaagggtgatggtcgccgccgtcgtggtaaaggtcatggccgtagcaataataatcatggacgcgataaccaccgccgtcgtagtaacaataattcataccgccaaaatggaaaccgcggtaagcgtggtcgtggcaacggacatgaatttgtaatcaagaataagaaagattaagattttatcttaaaaagggaagttgtaatttttacagcttcttttttgtattataatgatgtcattgtgtgaggtgaaaataatgattaaaggagtaggaattgactcgattgaagttgaacgagttaagaagatcgtggacaagggggatgcttttgccaaaaaagtattaactcccaaagaatttgatcaatatcaaaaaatggcaggcaaacgtaaagttgaatacctaggcggacgcttttcattaaaggaatctttttctaaagcaatgagaacgggtctgggaaagtatattggttttcaagatgtcgaaactttatgggatgatttaggtcatcccgttatgacttcaactaagtttgatggaaatattttcccaagtatcacacatgataatcatgaaattattacatttgtagttttggaggaaaaataaaaatatggttccaggctatcaccgtccagccgttgtaaaggtaaatttgggcgcaattagaagaaatataaaaaacgaaatgaaacatcttgcaacagggcaaaagatgttagctgtagttaaggccaatgcttatggtcatggtgcagttgaggtggctaaaattgcgattgaggaaggtgcagcaggcctttgtgtagctattttagatgaggccttgcaattgcgtcatgctgacattgttaagccaattttagttttgggagtagtttctccagaatacgctccaattgcggccgcaaacaatgtttcattaacgattcctaaccttgaatggctaaaggaagcagaaaagtaccttgaaaaagagcagttacagttgaaagttcatattggagtagattcaggcatgggtcggatcggctttaacgaagatgaggattttattgctgctaataaattcttacaaaataacgataatttctacgtagagggtatgttcgcacactttgcttccgcagacagtgctgatgatacttactttaagcatcaggtagaaaaatttgctcatatgagaagtttgttgacagttaagcctaagtggattcacgtagacaataccgctgccagcatctttaacaaggatgtgcctagtgattgtgttcgttttggaattggcatttatggtttgaacccatcctctaatcctgatagtcctgacttgaagtcatcaatttcgcttgaaccagcattatcatttgagagtgaactaactcatgtaaaaactattcatgaaggtgacggagtaggatatggttctacctttgtagctgatcaagatacaattattggaactgtgcctgttggttatgctgatggctttattagaaagtttcaaggctttaaagttaaagttggagacgaatactgtccaattgtcggccgaatttgtatggatcaatttatggtcaaaatgccaaagaaaatgccgttaggaactaaggtggtcatcatttccaatgatccaacagcgccaaataatattaaggccgccgcagattatgttgatactattcactatgaagtagcatgtttgttaaacgatcgtttacctcgtgtttactatgaaaaataagttaggcaataaaaaaatgcttctagaacaaaaatctagaagcattttttggtagatcagttttttaatccttaacagggtgttcaataaagacacctggattttcatcactcataatagtcatgccggcttgcaaatcttcgatttcagaaactacgaaaccttttctttgtaacttatcaacaatcgttctcatggtaatatctgagacaccagcggggagagtaaagagtgttcttctaacaaaattaccttcgagttcgccagcagctgcatcaagtgtcattacactagacatattagtgtgcttagacacaatcttggacatcttgatcaagttaccacgtgtattgtcagataaaacggtcaaaacgtatgaaccatttttaacatcccacgcatctgacaacatatcaagcattcttgagtgagtaagaataccataaaaatgattatcttcatcaaggacagcaatataaggtaagtccttaatgttgaaaaataccttgaagaatggtgaattgaccttaattgtcttagtggcattcttaagtaagtaagttactggtagattcatatcgccaccttgtgacttatgacggtagatatgcatcttataaatgttaccacggaaaatagtaccagtatcgtcaacgattggcacacatctgtagcctgaatcttctaaaacttttaaagcttctgctaatgtggctttttcattaactgttgttaaataatcttttttaataactaaagatttaataagcatgagttcgcctccgaaagtgagaaatgtttcaagtaattatagcatagttgatgagttaattaaatattaattaaagttcatctgaagtaacaactatattttaacaatagttagacaaataaaaaagcatctccgaaaaaagagatgcttttaagtgaaacaagttttagattattgacgaaccttaacgccagtttccttaaatgccttgtccataaccttcttcaattgatctgcagaagcagtcatcaattcttgttccttgtcacttaatggcatttcaatgatttgttcaagacccttacggccaacaactgcaggagtaccaatgtgaatgtcatgtaagccatattgaccgtccataggaactgaaagtggaagtacacggtgttcatcgttcaagatagccttagcgatcattgctgaagcagtaccgattccgtagaaagtagcacccttcttgttaattatttcgtaagccatgttagcaacttccttgtggatgtcttcaagcttagattcatccataccgtgagccttaacccagtcactaacctttacgccaccaacattgttgtagctccatgctgggaattcagtatcaccgtgttcaccaagcatgtaagcattaactgaacgtgggtcaacatgttccatttcaccgataaccttttgaagacgaccagtatcaagtgaagtacctgaaccgataacacgatccttagggaaacctgacattttccaagttgcgtgggttaaaatatcaactgggttagcaacaactaagaaaataccttcaaagcctgattcaacaactggttcaacgattgatgataaaatcttcaagttcttgttaacaaggtcaagacgagtttcgcctggcttttgtggagcaccagcagtgataactactaagtctgcatccttacagtcagggtagtcagctgcatagatattctttggtgaagtccaaggggtagcatcagctaagtcaattgcgtcaccttcaacgtgttccttagcgatatcaataatacccaattcttcggcgataccttgttgtaccattgagaatgcgaaggttgaacctacagcaccatcaccaacaagaataactttacgaggtctttcatctcttggcataaataaaaatctccttttttattagtgatatttttaacaaaatgaattataccatgatagcaagcattaataaaattattatttcctaattgtgctattatatgtaagattgtgtgcatagtgaggagtaaaaataatgaagataattgcaggtttaggtaatccaggacaaaaatatgataaaacaaagcataatactggtttcatgacaatggatcattatttgaatgaaaagggtttgtcactggataaagataaatttgaaggtcattggactaagcaaaaaataaatggtgaagatgtaattttgcttgagccgcaaacctttatgaatgaatcaggtcgttcagttagtcaagtggctaacttctttaaggttgatccagcagatgtgctaattattcaagatgatatggatatgccaattggtaaaattagaattagagctaatggcaaatctggtggacataatggaattaaaagcatcattcgagatttagggacggaaaagtttaatcgtttgaagattggtattcgtcatccgaaaaatgcaacggttgtttcatgggttttgacaccatttaatgatgaacaacaaaaattgatggatgatgcatttgcgataagtgtagatattattgacgactttatcagcggacatggtagtcaatatttaatgaataaatataattaaaatgcgtttaacagagattttagataaagatcaagatttaaataattttatttcaaaaacaaaacaagtaaaaaattcactaatcactggcgctaatgccggtgcttttagtctattgctaaaacagataacaactaaattagcagctccacttattttaattgaagaaaacgaaagtaaagcacaaaacttatatggtgaactcagtgccattatggcagatgaaactgtgcaaatttttccagtagatgctacaattgcaacgcaaacggcagttagttcgcctgatgaactgagcagccgaattcaggcacttaattttttgttaagtggtaaggcaggaatagtggtaacaacgccgcaggggctgcaatacaaactgaccaatccaactgattttgcgcaggcaaagcggagttttgagccaggtcaagaatatgaactaaaagaactcaatgaatggttgcttgcttcagggtatcagcgtgattctttggtagcacgaccaggcgaattcgccatccgtggtgatattttagatgtttatccactagatcgagaaaatcccgtgcgaatcgaattctttggtgacgaaatagatacaattaaggaattcgatttagctagtcaacggagtcaaaaagagttagacaaagtagaagttgcagcagctcaagatcgagtttttactaaggatgcaattgcggcagcggctaagaaaattgaacaagatatggccagtgcaccagctcccgctaaagctgtcaaggaccactttgcggcagttcttgatgaattaaacgatggcggtttacctaaaaactatgctttcttaattgactatttgcttgaaatttctagtagtttactcgaatatttgcctaaaaatgggcagattttatttgacgatttgcctttaattaatcaagcggttgaaacagttgataagcaaaacgctgcttttattaatgatgaactaaaaactggtgcaatgttgccagggcaaagcttgcggtcagattatacaaagattctgagcaaagataagcaccatcgtatttatttctcattgtttcaacgaagcatgggacgactgcgcttaggccagatgctcaattggtcaacacgtgagccagaacaattctttagtcaaatgccgctgattaagtcagaattagaatcttatcaaaaggcggggcaaaccgtcattttacaggctgataatgaaaaaagagcacagcaaattgatcaaacaatggttgattttggcttaaatttaccaattgttggtgcagacgaaattgttgaacaacggacacaaattgtagttgatggctttgttagtggctttagtttaccaacagttaaattggtatatctaacggagcgtgaactatttaataagcgcccacaacgtaaaaaaagaattaagacactggagaatgcccagcgtttgcgcaattatactgaactgaagccaggggattatgttgttcatgttaaccacgggattggtcggtttgaaggaatcaagactttagaaaataatggtaccaagcgtgactatattacgattacctaccagcatggtgatcagctttttgtaccagcagatcaattaagcttagtacaaaaatacgttggttcagaaggtaagacaccacatattaataagctaggtggtagtgagtgggctaaaaccaagcgtaaggttcaatctaaagttgaagatattgcggatgatttgattgaactttatgccaaacgtgaatcagaaaaaggctttgctttttcacctgatgatgatctacaaaaacaatttgaagatgcctttccttatccagaaacacctgatcaattgcgatcggttaaagaaattaagcaagatatggaaagctcgaagccaatggaccgtcttttagtaggtgatgttggttttggaaaaactgaggtagccttacgagcagcttttaaggcaattcaggataataaacaagtagcctttttagtacccaccactattttggcgcaacaacactatgagacgattcaagatcgcttcaaagatttcccagtcaatactactatgctatctcgttttcaaacgccagttgaatcaaaggaaattattgaagggctaaaaaatggcaagatagatttggttgttgggactcaccgtattttgtctcaagatgtaaaattcaagaatctaggattgttaattgttgacgaggagcagcggtttggcgttaagcacaaggaaaagttaaagcagttgaaggcaaatattgatgttttgacattaacagctacgccaataccgcgaacgcttcatatgtcaatggtaggtgtgcgtgatctctcagtaatggaaacgccacctcaaaacagataccctattcaaacttatgtgatggaacaaattcctagtgtagtaagggatgcatgcttgcgtgaaatgcaacgtgatggacaggtcttttatttacataatcggattagtgatatcgatgaaactgtcgaaaaactgcaggaattgatgccacaggcgcgaattgcagctgcccatggtcgaatgagtcagaatcagttggaagatattctttatcgcttcctgaatcgcgagtttgatatcttggttacgactacgattattgaaacaggaattgatatgcccaatgtcaatacaatgatcattgaagatgctgaccactatggtctaagtcagttgtatcaattgcggggtagaattggccgtagtgctcgtttggcttatgcttacttcttgtataagccaaataaagttttaactgaggttggtgaaaaacggcttgatgcgatccgtgacttcactgaactgggttctggtttcaaaatagcaatgcgtgacttatcaattcgtggtgctggaaatatgctgggtgcacaacagcatggctttattgatagcgttggttatgatttgtactcacaaatgctggctgatgcaattcaagaccgtaaggggaagacaacaatcaaaaagtcaaacgcagaaatcgaccttggacttgaggcttatattccagattcgtatatcggtgatcaagaagaaaaaattgaattttacaaaaagattaaagccgtctcaagtcaggaagaattaggtaaaattgaagatgaattaatcgatcgttttggtgactatccaacggccgtcgagaatttattagctgttgccggtctaaaggttgatgctgacatggctcaagtgctcaatgtggttaaaactgacgataagattaaagtggaatttacgaatgcagcttcacgcgaacttgagggacctaatatttttaaggcattggagcatgtaagcttaaaggctcgcattagtatgaatcaagaaaaaagaatggttgtcttgctattgttgccggataaaatgaagaatcgtgttttattcaatgaactggcaatctttttacaggcagcaagcgacattgtacaaaggtaactgtaggagaaaaatatgaggattgataaatttttaaaagtttcacgattagttaagagaagaaccgtagctaaagaaatggctgatcaaggtagaatcaaagtcaatggtcgagttgtaaaatcaagctacgatgtaaaaattgatgatattattgaagtaggttacggcgccaaaaccatcaaggctaaggtgttaaatattcgcgagaccacgaaaaaagcagaagcaagtgaactgtacgagctagttgattaatgacttttgattaaatcgttgttatacttgacttagtatagttatttagtaattaggggattaaacaatgaatcatggtccacgtatatataattcgttgagtccagaagagcagagggcgcgtcttagacgtaaacaggctaaattagagaaagaaacacaccgcaagcggttgaacgtaattatggcagtttttgctatcattttcgttgctttaggtgtacagattgcaatcaagatttctcaaactggacgactgaataatcaagtacaagctgaaaaacagactttaactaaagtaaaaaataagagaaatgacttagaaactgaaaagcaggatttgaaggatccaaattatgttgctaagctgattcgttataaattctattattctaaatcaaatgagaagatttataacgtgcatgaaagaaatgatgataactaatggaaaagtatcaagctggtaatcgggtgactggtgtaattaataacattactgacttgggcatctttgttactttacctaatcggcattctggtttggttcatcatagtgactttggcaataattggctacgcgaacgtcgtcgttatcatgctggcgatgaagtgcgcgtggttgtggtgcacatccataaagggagatttaatttatcgatcactcgagtgaatgatccggaattagttgaccatgataatcaattttctaagacaaagccagctgattttgatcaagtcctgaatcaaacaacgcgggatgctaaagaagaaattgaaaagctaaagcaagtattaactgagaattaagagatggtccgaaagggccattttttgttagaaaaataatgaaaattaatgatttttttgaacaacatcagattgacttaaaggataaaagactattagtagccgcaagtgcgggaccggattccatggctttactagatatgctagttaatttgcaaaaacaactaagttttactgtttttgcggcacattttgatcatcaattgcgtgcggatagctcatatgaagtagaagttttgcaaaattattgtgctcaaaagaagatttgcctgtttaatggcaagtgggataaacatgatcagccccaaacgggaattgaggcagcggcgcgagaggcacgatatcattttttgactaatgttgctcatagcgagcgaatgaactatttattaactgcgcatcatggtgatgatttgctagaaaatattttgctcaaatttattcgctcgggaaatcctgaagagatgaatagtttgcaagatatcggctctatgcatggcgttgttttgcttagaccactattagcctatagtaagcaagaattactcgaatatgatcaagagcgtgaaattgactatgtaatagattcaactaatacggaggatgagactgttcgaaatcgactgcgtcatcatgtggtgccattattaaaagaggagaatcctaatttaattagtaatgcactgcgttttagtgaaaaaatgagtcaattgacggatttggcggatgagcagttgaatagtatgagaacggttgagccatttttgggtgcttggcgaattaaaacggacaacttaaatgatttatctacagaagaaaaaaatattttttggcaaaagataatctggcaaaaatatcatcgccgggtaaatgaaaatttgggcaattttgaggtgattgattatcaaggttatagttatttagttgaaaataagccacagaaaattgtgcagccatttagtatcgaactaaatcagcaatttgaattcaacggagcttattatttactaactactgataggcaagctgatttgaaagaaataggaagcttttggctggaaagggatgcacattttactgcgggaagtctagtacctgctagcaaattattgttgaaaaatggtcaacgagttaaggcgaaaaagaaatttgcagaaaaggcaattccctttgccttgcgctcttgctgcattacaatttatgctgaaaatgaacctgtttttgtagaaaaatgttatcaaaaacaggactttatcacagatggtaaacattatttcctatacatttattaagaagtcttcaaaataggtgaaaatgttagtggttgcaagctaatttgtgatagaattttaaacgtataacttaaagactttgcggaggttttttatgaagaataaccggaatcggctactttcaaacggccttttctatatagttgtgttccttctgctcctatggggaatcaactgggcactcggcggctctaacaatagtggtagctcagagaatatcagttactcacaatttgttaaagatttgcgtcaaggcaaagttaaaaactttagtgttcaacctgctaatggtgtttacactgtttcaggtagttacaagactgcacaaacaacaaagaatcaatcaaataatagttttgatttctttagtaataattcaagtagaaaagtttcgcgcttctctactaccatgttacagaatgattctaccgtttctaacgtgcaaaacttggcacaaaaaagtaatgctcggatgacaactcaaggagaatcacaatctggcaattggatttcgaccattgtcatgcttgtgccaaccgttttgtttatcgtcatgctttggatgatgatgaaccaaggtggcgctggacgtggtggtggcggcggaataatgaatttcggtcgttcacacgtcaagccagaagatccttctaagaataaggttcgtttctctgacgtagccggtgaagaagaagaaaaacaagaattagtcgaagtagttgaatttttgaaagatccatctaagtacactaagttgggtgcaagaatcccatctggtgttttacttgagggtcctcccggtactggtaagactttgcttgctcgtgctgtagctggtgaagctaacgtgccattttattcaatctcaggttcagacttcgttgaaatgtttgtcggtgttggtgctagtcgtgtacgtgacctgtttaacaatgccaagaaaaatgcaccaagtattatctttatcgatgaaattgatgccattggtcgtcgtcgtggcaatggcaccggcggtggtaatgatgaacgtgaacagactttgaaccaattattggttgaaatggatggttttgaaggcgatgaaggtgttattgtcattgctgctactaaccgttcagacgtcttagacccagctttgcttcgtcctggtcgttttgaccgtaaggtattggtaggtcgtcctgacgttcgtggtcgtgaagctattttaaaggttcacgctaagaacaagccacttgcacctgatgttgatttgaaggaagttgcccgtcaaactcctggctttgtaggtgcagatttggctaacgtcttgaatgaagccgcattagttgctgctcgtcgtaatggtactgagattactgcatcagatattgatgaagccgaagaccgtgtgattgccggtccagctaagaaggatcgtttgatttctgaaaaagaaagaagacgtgttgctttccacgaagctggtcactcaatctgtggtttggtcttaagcgactcacgtactgtacgtaaagttactatcgtacctcgtggccgtgctggtggttataacatcatgttgcctaaagatgatcaattaattttgactaaaaagcaattatttgaacaaattgttggtttgatgggtggtcgtgcaggtgaagaagcaaccattggtgataagtcaactggtgcttctaacgactttgaacaagctactcaaattgcgcatagcatggtagttaactatggtatgaccgaatccttaggtatggttgagcttgaaaaggaaggcgaaagcaatccttacggctttaagccatatagtgaagcaacttcagctaaaattgatgaagctgtaaagaagattttggatgaagctcatgctaaggcccttgagatcgttaaggacaacaaagaaaagcatagaatcattgccgaagctttgctcaagtatgaaaccttgaatgaaaagcaaattatggccttgtataagaccggtaagatgcctgaaaaagacgaagatgaatatccgagtgaatcaaaggcttcaacttatgaagaagctaaggctgctgcagagaagcgcgaagttgaaaaggcagaaaaaaaggattcagatcaagcattagctgatcaagaaaaagataccttggagactccatctgaaaagaatcatgaagttgaagaaaataatcctgagaatcccgaaaaggatcaatcagaaaatgaaacttcaactcaagatactcctgcagatgatgagcataaagacaattaaataaaagtagggcctgtcacaggctctatttttttagaaaagaaggataaaaatgagtgattatttagtaaagtcaattgataagactaaaaacttacgcttgttaaccattaccgctaagggtgtagtgagtgaagcacaaaagcggcatgacttgtggtcagcttcagctgctgtgcttggtcgtactttagtaggatctcttttacttgctggtgcagaattgacagataaggaagaattgacagtccgtttattaggcaatggccctgttggtccaaccatcgtgacagctacctccgatttgaaggtaaagggttatgttaagaatccacatattgctttaccacctaagaaaaatggtcatattgatgtgaaaaaggctgttggacaaggatggtttgaagtaactaaggaccttggcttgaaggaaccatacacaggtcaggtaccaattgtttctggtgaaattgctgaagattttgcttactatttgactaagtcagaacaaattccgtcagctgttggtttgtcagtatttgttaatccaaataattcaatcggtgaagctggtggctttatgttgcaagcacttcctggtgctagtgatgctttgatcgatgaaacgattaagcgaattgatgcattgccagcactctcaacttcatttttggatggaatgacaccagaagacttagcacgtaaaatcttaggaaccgattgtaagattcttgaaaaagatgatgtagcctttaactgtgattgttctaaagaaaagtatgctggtattttggaaactttgaagagcgatcaattgaaagcaatgattaatgaagatcatggtgccgaacttacttgcaatttctgcggtaacaagtatcattattcagaagatgaattgaaagatattttagctaaaaagaacaaagataaagattattaaggcaaataaagccctaaggttttaaccaatgtcattaagttaagacattgacaattaatattagacttttaaagcactgatttaacatttaattggttaaattggtgcttttttcgtacaacaaataaggcatagcacagattctgcttttttaagctacgcgatataaataatatacagctgatttgggcttaatatttctcttgtccttgcggcctggtctaattggaatggtataatagctgatctgaataaggatccgttcaaaatcttgcgttaaagaagaagccaaatacatgctctgaataatcaagcatgattgcttgaaattgatggcatattgatacttgcaatgcttttgcggaatataggcctgtgcatcaatttgactgattgcattaaacataatcatatgggcataaatttccatttcaataaatttatcttgtttggaatggaactgtacactgcctaaagaatacttcaatttcttgaaggaggtctcaataccccaacgcagatgataaagctctttaattctttttagcggataattttttcgatcaagattggttagcacaacttcccattcttctttgcctgatttggcatcattaattctaaatttgcaggctcgaaattttattgtgcataactcgccaaaatcccagcttagatcctgggtatttttagagcgatacttaatatattggcgataatgatgctggacatggtgaatattctcactggctttatgcgtgatgtagtaatagttagaagtagttaccaggcaggaaatctcacgatcacattcttgatcaggcaatgtcgttatttctttaactccgccttgtccagccttagttcgtattatgtaatgacagttaggcaggcgattgcagttttcaatcatattgaaactagtgtagccacgatccattgttacaatatatggaccacaattcaaagctttaagcatttgaacagccgctttgcgttcatccatttctgatttaggctgaaaaatacaatcctggtaggtattattcaatagatcatataaggcattaacgtgaatttgacaatagggtttctttttatgagaagaagcttgtacaatgttattcgatttcggattccagatttgattaaagtcagagccatcaatggcaaacaaacggtagtgatgatcaaaaagttgaatattaaatagattttgattaaaaacagtcagaatatgtttaaaacaagcaggagaaagctggcttttgcgttgaacataggcagaagtactaactactttatcgttctttttagttgcatcttcgccaaaagctctaaagagttcactgtttaaattctgaccttgcatgttaattgtagttttaaggactgtcgctgcatctaaagtgcgtttcctggtaaaagcatgaggattattaataaaatcgtgaatatgatccccagtattattgataatttgatcaagacgttctagaatattcttatgaagggctttcataattaacaccatctttctggcaataattttgaaggtttaaaatatataatatataagataggcgaaaaggctggtcttttcgcctttattttatacaaaaaaagagatcgaatccaaatgattcgatctctaaaaaagcacccttaattgtcaatgtcttaacttaatgacattgggttttaaccagcggggcttttttgatatcataatagggtaattttgaaaggatgatttggtgaataacagctggaaaattcgcgatatcaccattccaaaccgagttgttgttgcgccgatggcgggagtttcaaactctgcattccgcgttgtctgtaaggaattcggagcggggctggttgtctgcgaaatgatttctgatcatgggatcatttatggaaataaaaagacattaagtatgatggatgttgatccgcgtgaacacccaatgagcattcaaatctttggcggaagcgaggaaactttgcttcaagctgctcaatatattgatcaacataccgatgcggatattattgatattaatatgggttgtcctgtacctaaagtaacaaagactgatgcaggttcgaagtggctacttgattcaaacaagatttatcagatggttcacgcagtagtgcagaacgttaaaaagccggtttctgttaaaatgagaacaggctgggataaaaagcatatttttgctgtagaaaatgctttagctgctcaagaagcaggcgcaagcatgattgcgatgcatggtagaacacgtaaacaaatgtatcaaggtgaagctgactgggaagtattacatgatgttgcccaggtgctagatgtgccttttgtggctaatggtgatattagaacacccgaattagctaaaaaagcattggatgagatcggttgtactgcagtaatggttggtcgcgctgctttaggtaacccttggattttgaaagatatggtacactatctggaaactggtgaaaaattgaagccgcaaactgttcgtgagaaggttgaaacggctaaacatcagcttcacgcacttgttaaaattcacggtgaaaagcgtgctgtaccagaatttcgtcagcaagccgcgtattatttaaagggaattccccgttcagcccgtactcgtgctaaaataaatgaggtctggacgcgtcaagaagtatatgatttgcttgataattttgttgacgagtatgaaaaaagagaagaagctcgtgctgcacgacgcgcgacaatgaacaaataaatggaggaaaagtaaattggcaaagaatgaaatgaatgaccaattaatagttcgtcgccagaagatggaagaattacgtgaaaacggaattgaaccatttggtcaaagaaaatttgatcgtcaatatttggcaagtactttagaagaaaagtatggcaacgaagataaagaagaattaaacgctgatatgcctaagaccaagattgcaggtcgtatgcttgcaaagcgtggtaagggtaaggttggttttgctgatctttacgaccgtactggtaagattcaaatctatgtacgtaaggatattgttggcgaagataactacaagatctttaagaaatctgatattggtgatttcttaggtattgagggtgaagttatgaagactgatactggagagcttactattagagcccttcacgtaactttcttatcaaaggctcttcgtccattaccagataagtaccatggtttaaaggacgttgaggcaatttatcgtcaacgttaccttgatttgattaccaaccatgatagttacatgcgttttgttcaccgtacccaaatcattcaagctattcgtgactacttaaatggtcaaaacttcttggaggttgaaactccagtacttcacaacattcctggtggtgctgaagctcgtccatttattactcaccacaacgctttggatattaacctttacatgagaattgctttggaacttccacttaagcgtttgattgttggtgatatggaacgtgtttacgaaatcggccgtgtattcagaaacgaaggtttggacactcaccacaacccagaatttactgaacttgaaagttacgcagcatactgggactaccatgatgttatggatgaagctgaaggtattatccgtgctgcagctaaggttgtttcagatgacggtaagatcacttaccaaggtactgacattgacttaggcaagccattccgtcgcgttcacatggttgacttgatcaaggaaaagactggcgttgacttctggaagccaatgactcttgaagaagcaactaagattgcggaagaccacgacatccacgttgaaaagttctggaaagttggtcacattattaacgccttctttgaaaagtactgtgaagaaactattgttgacccaaccttcgtttacggtcacccagtagaaatctcaccacttgctaagaagaatgctgacgatccaagatttactgatcgtttcgaaatttacatcatgggtgaagaatacggtaacgccttctcagaattgaacgatcctgacgaccaacgtgaacgtttcgaagctcaaatggaagaacgtgaagcaggtaacgacgaagctgacatgatcgatgaagattaccttcgtgctatggaatacggtatgccacctacaggtggtttgggtatcggtattgaccgtttggtaatgcttttgactgatgctccagctattcgtgatgttcttttgttcccaacaatgcgtccagaacgtgttgaaagcgtagaagctgaagttaaggctgatatggaaaagaagaataaagaaaataagtaatcttataaattaaaaaactcttatctatgttttaagcattgtactgagacgtaaaaagtagacaattaaaatattggattaatagaggcttgacttcgatactctttcggggttaagccttttaatctgctctttatcctttcgttgttatagtattcgatatattcctcgattgcttgagttaattcttgaagattatgatacttgtattcttgatcatagaacatttcagttttgagcaggccaaagaagttctccattagcccatcatccatggagttgccctttctggacatgctttgagtaataccatggagttttaaagctcgctgataacgagggctttgatactgacagccctgatcagtatgaaaaatgcagttattaagagctgtttctttggcaaaagccttgtcaagcattgtcattactaaatccatatctggatgtttggagatagtataagaaactatatcgccaccgcagccgtctagaataggcgataaataaagcttttcattattaagatgaaattcagtgatatcagtataccattttgtgttaggcagggctgcgaagaaatcacgatgaattaaatttggagctattttgccaatagtacctttatagcttgaatatttgcgcttattgcgcctgatgcctttaagacctaatttatgcatccaatagcgaacggttttctccgtaactttccagccctctctgattaactgcaaagctactctgcgatatccatagcggccttgatgatgattaaaaatctcatggattctagcaataagctttgaccgtttaggcttgacgggctgtcgtttgataatcttgtagtatgagcttctggcaattataggtagctcagggtgctctgcaatcgcagctaatacataatttaaactaactttgaattcttgccttagatccgtaatcaccctagctatttcttctgatcttcttggtccaaggcacttagtttttttacgtattcgttcacaatacgcaatcgcaagttttcttctttcagctgctggatctctttctccagttccttgcgagatttctgcttttctttggtcacgggcagggcgtcctttctgtttgataatgacattatacccgtttttcttatattctctaatccaattgttaagcatgccaatacttttaaaccccagttccaaagacagctgtaagtatggtttattgccaaagattgcttgttcaatagttcgctgcttaaactctttggaatagctttggtttttagtagttaaaatttctattccatgcatatcaattaatctaagcatatagtctaaattagctagattcattctgtacgctttagccaattgactgattgagatattttcatctttccatttatgataaatttctattttttgttctttattaaatttagacatagtaaacattctaagctaaatagtgaattagttatccgacgggataattgattcactatttttattcttttgtagaattaaagtagtagtaaaacgatatgccctgaggtctttagacacttgatgtcgcataataaactggcagttttacttaagttttcaatagtctcttcgaagaatgtggacactagatgtcgagtttagaaaattagatctgatttcttaagtaaatacgttttactactaagttttggaggtttttattatgcaagttacttttggaattgatgtaagcaagtctacttctactgtttgtgaactaattggtgaaagcaaaaatgaactaaccattactaataatcgtcctggttttattcaattgcttcatgaattaaccgctttttctaaacatccgcaaattatttttgaagctaccggtgtttattcacgcagactgcaggcttttcttgaagactacggctatgaatatgttgttattaatccgcttaaagccaaaaaagagatgaatatggggctacgctacaacaagaccgataaaactgatgcttatcatttagctttaattcaaagactttatcgccatccggttaatcaaagcgaatcccaaacttataagcagcttaatgctttgagccgcttctatgaccagctgacaagtgacttggtaatagctaaaaatcgacttcaccaagctctacaatcgacttttcctgaaattgaaaatttattttcttctgctagaggtaaaaattactggcaaatagttgtgcgatatcctcattgtgacttagtaagaagagaagataaaaaacagcttattaactggttaatgagcttaaaggggattgcttttaaacacgctctaaggactgcagataaattaattgaattagcttatcaagcttatcaagttgtatcttgctctagcatagaagtcgagcaagtgcagtattatgcacacagattgcttaatttaagtgatcaaagagaaaatttaatcgcaagaatggttaagttagcgaagtctttgcctaatcatgatttagaaaacctagaaagcattccaggctttgcacagaccactgctgtcagagttttagcagagttaggagatttacgcagatttagtaatcctaataaaatcaatgcttttatcggaattgatccaggcagatatcagtcaggagaaatggactctaatttaagtattactaaacatggcaatgcagtcgcacgtaagttgctttatcgagctattggacaaattgataatgcagctaagacaaatccgtgtcatatagcagattattatgaaagcaaaaagctatcctctcaaaccaaagggttcaaaaagatagctattgcttcaattcataaactaatcagaaccatttatgccctgattatcaatgatcaaccatatgattacaacgtagccacacataatcaaaaagactttagtcgtaattaattgatcaagtacattataacgctaagcccaaaaatcagatatggatctgggcttatttgtcgtgtctaactaaaaaaataaatcgacactaaaagatgtttaagttgaaatttaaacaaaaaatgaagccaaacttcttattatgcttgactttacgtagaaaaagacctaaaagtgtctaacttttaggtctcagttcacatggataagagtttgtgtttatatattttttaattgagaatcattttttcatcagagtattttttaggatcatttaaatcccattgctgatatctaacttcttgacacttaaagcctaattttttgtaaagctttttggccttagtattttctgcaaatacatcaagactaactggtcgactcatgtatctcaaagctgtcgttgctaaagcatacccgatacctttattttgatgaattggatctacataaatgtaatccagttcttggggatgaactgcaacgaagcccaatatgctgtcagcatcataagctacataaattttgcaggagaaaaaatcatccttatatggagctgtctctaaaggtatgaagtatttttccgcaccaccaattgttagctcttctttacgactaacgtcgtgaatgcgacatacttcagcataatcgtttggttgatattctctgatattaaattttggcatgtttttctcgcttcctaatattaagattttgatttagaaagcaatagtacgtaatctcatgtgaaatctcctttaattaaattgaagatattatagcaatttttttaattcggtacaataactaaaattaacttagttaaaaacagataagtacccggatttaaaattgaagtgcaacactaagtgttaaacaaaaaggccatgaagacctaaacttgaagtgacgaaaaatcaagaaaggaagatctttatgaccaattcaaattctagcatttctaagcactatcatcaattaaccagcgtacaacgtggacaaattcaagcaatgctggattccggcataacttcccgtactgttatcgctcaagaagtcggctgccataagtcgacaatcagtcgcgaaatcaaacgcggaagtgtcctgcaaagagacagcagctatttattgtatgagcactattacgctgatactgcacagatttattatgagaagcgtcgcaaaaactgctatcagcgcaatccattgaagcattatgctgtctttttgagaatgctctccagacgctttaaagctaaatttgatgccaccagcatcgatgagttcgttggtgaattcaaaaggactatgccaggctacccttgtcccagcacaccaaccgtctatcgctatattgatcagggcttgctggacataagcaatattgatctgcctatgaagctcaaaagacgcaggaacaagcgtcatcacagccatggcggtcacgctttgcacaagaagcatcttggcaattccattgaacagcgtcctaaggaggttgaagacagaaaagctccgctgcactgggaaggagatctggttaaaggcgtcagacgcaagaatcagcctgctttaatgactttgactgaaagaaccacacgctttgaagtagttatcaagattcctgactatcgggcaagcacatgccaaaggctgcttcaaaaggagattgacagacatcctgcctggtttaaatcaatcacgtttgacaatggctctgagtttgcggatatgaccaagatcaagggctgccagatttactttgctcacccatattctccatgggaaaggggcaccaatgagaactgcaatggtcttttgcgtcaattcttccctaagggcaagagcatgaaagacaagtcaaaagcttatgttcaacaggcaactgatgccattaaccacaaatatcgccgaatcctccaatatcacacagcagaagaactcttcaagcaatatatttcctcatagcctaactgttgcacttaatttgacaattcaggaaaacagataagtaatattttttcaaaaagtatttgcaaagagaataatctttgctataataatttttgtatcgcggaagtagttcagtggtagaacatcaccttgccatggtgggggtcgcgggttcgaatcccgtcttccgctccaagatgaagagctcacgaatgtgagctttttttgtgcctaaaataaatttatcttttttgataaaaaggtcttgcaaagaaaaatgtatttgctataataatatctgttgttgcggaagtagttcagtggtagaacatcaccttgccatggtgggggtcgcgggttcgaatcccgtcttccgctccaagatagaaggctcaccaagtggtgagtctttttttacgggaaatagctcagtttggtagagcgctacgttcgggacgtagaggtcgccggttcaagtccgattttcccgatatacaagctatccgtttgggtagcttttttctttttgttataatatcttttaaaacttaaagggagattaaaaatgacggcaactactgaagaaaaatacaaattattagtggagcaagctagagctttgattgagggagaagatgattggattgctaatacagctaatttatctgctcttttgtttaattcgttaaatgatgtgaattttgcaggtgtttatcgctatgaaaatgatgaactgatattaggtccatttcaggggatgccagcatgtgttcatattcaaatgggaaaaggtgtttgtggtacggctgcacaagcaaaaacaacgcagattgttaaggatgtacatgaatttgctggtcacattgcttgtgatagtgcttcaaattcggaaatcgttgtcccaatttttaatcagggaaaactttggggcgtctttgattttgattcgaccaagctagctaattttgacgaaattgataaaaagtatttaactgaaatagcgaaagcaatttttgcgtaattattagaattggacataatgaagttgaagataagtcaaattgttttacttactgacaaaagaaaagtaaaataccataacgtattttaaagggtggtgtttgtatggaaaattcatatagtaagagcgttaatcaagtattgaaaattgcacgtgaacaagcacaaaattttcatcatcgcttgattggcacagaacatgttttattggctctagtaattgaaactgacggtgaagcaggaaaaatcttgcgttcatggggattaacaccaactgcagtacgtgaagaaattgaacgttatacaggttatggctctgcccctaaggcaagctacatggaaatgtcaccacgtttgagtttagctttggattatgctagaagacgagctaatgacgatggagttaaggaagttaacactaatcatgttttgctgggaattactgcaagtgagcaggttttatcagcaatgattttgaaaaacttgaatgttgatattcctcgtctgcagcaggatgttgaagacagtttgagtcaagaccaagactttggtgattcagctaattggctgggtgatgataacacgacgactggtcaaaagaagcgcaagagcactactcctaacttagataaggtagcggttaatttaaatcaacgtgtgcgtaatggcgagattgatccggtgattggccgtgaccaagaaattaagcgtgtgattcaaattttgtctcgacggactaagaataatcctgtcttagttggtgaaccaggagttggtaagactgctgttgctgaagcgattgcaactgagattgtcaacaaaaaagtgccacaggatatgcttaagaaacgggtaatggccttaaatttaggtagtttagttgctgggactaagtatcgtggtgagtttgaagacagaatgaagaaaatcctgaacgaagtcaccaaggatggcaatgtcattctctttgttgatgaaatgcatactttaattggtgctggtggtgctgaaggtgcaattgatgcttctaatatcttgaagccttcgcttgctcgtggcgatattcaaatgattggtgcaactacttttaatgaatatcaaaagtacattgaaaaagatcaagctttggcacgtcgttttcaacaagtgcgcttaagtgagccttcaagagatgacactttgacaattatgcgtggcttgaagtcgaaatatgaaaagttccatcatgtgactatttctgatgagagcttgaaggatgcagttgatttgtcaacgcgctatatttcggatcgctttttgccagataaggcgattgacttagtagatgaagctagtgccgcagttaagattcgtaataacattagcaatgatgctgagctagaaaaagttaatgagcaaattaagaaactgattacgcaaaagaatatggctgccgctagtcaaaactttgttaaagctgctcaattgcaggatgagcagaacaacttagaaatgcaacgtgaagcaatggtagagaagttagaagacaaagttagtgctaaagctgtggttgagccagaagatatcgctaaagtagtttccaactggactggcgtccctgttacccagatggaacgcaatgaatcacggcagctagctaacctggaaaagattttacaccaacgtgttattgggcaagataaggctgtttcagcagttgcccgtgctattcgtcgtagtagaagcgggattaaagatgaacgtcgtccgattggttccttcttgttcctaggtccaactggtgttggtaagacagaactagctaagtcagttgcagcagcaatgtttggctcggaagacaatttgattaggctagatatgtctgaatatatggaccaaattgcttcaagcaaattaattggctcggcaccaggctatgtcggttatgaagaaggcggtcaattatctgaaaaggttcgtcgtcatccgtactcggttattttgcttgacgaagtagaaaaagctcatccagatgtctttaacttgcttttgcaggttttagatgaaggatttttgactgactccaaaggtagaaaagtcgactttagaaatacaattataatcatgacttctaatttaggttctcgttcgctctttgataataaggcagtcggcttcaatgcagataatgcagatccagccaaggcgagatcagctaaagttgaacaagcaatcaaacaattcttccgcccagaatttttaaacagaatcgatgaaactattatcttcgatgaactagataagaagcagctgcgcaatattgtaactttgttaacgcacaagctggtagttcgtttgcaaaagaagggtatcgaattgaagctatcacgggcagcactggatcagattgcacaagatggttatgatccagaaaatggtgctcgaccattgagaagagcaattcaaaatgatattgaagacaagattgccgagatgctgattgtaggcgaagttaagtcaggcgacactttgaaaattggtagtcagcatggacatttaaaatttgaagtagttaatccgaaaaaagaaactgtaaaagtcaagtgatattggtgctataccttgacaaaatgctgaaaatatcatataatttttgctgatttaaaaagactgagattcaggattttgctgatctattgtccagcaaaatgataagggacaaaaacgacaattgttgtttttgtcttttttatgcctaaaattgcagttttttgaatttgtaacagaaatgtaatatttgctttcttagacagaaaggatgtttttccttgttaaatggacacgtagtgaactacggtaaacatcgaactagacgtagcttctcccgcattaaagaagtattgaagctgcctaacttaactgatgttcaaaccgaatcatataagtggtttcttgataaaggcattaaagaagtctttgacgacattatgccgattagcgatttctcaggtaagctttcattagaatatgttggctataaattgcaaaagccaaagtatacagttgatgaagcccgtaaccatgatgcaacttatgctgcaccaatgcacgttaccttgaaattgactaaccaagaaactggtgaaattaagactcaagatgttttctttggtgatttgccattaatgaccgaatcaggttcatttattgttaacggtgctgaaagagttatcgtttcacaattggtaagatcacctggtgtatattacactggcgattatgacaagaatggtcgtcaaatctttggtactactgttattcctaaccgtggtgcttggcttgaatatgaaaccgacgcaaagaacgtttcatttgttcgtgtagaccgtactcgtaaattgcctcttactgtattgattagagcaatgggtattggctctgacagtgacattattgatatgtttggtcaaagtgatactttgcaattcactttggacaaggatgttcataagaacccagctgactcacgtgtagctgaagccttaaaagatatctatgaaagacttcgtccaggtgaaccaaagactactgattcttcacgttcacttttgtatgcccgtttctttgatccacgtcgttacgatttagcacctgtaggtcgttacaagatcaataagaagctttcacttaagaaccgtttatacggtcaaactttagctgaaactttagctgatccagatactggggaaattgttgctaagaagggtactgtagttacccacgaagtaatggataagttagctccataccttgatcgtgatgactttaagatggtaacttaccaaccttcaaaggaaggcgtattaccagatcctattgcagttcaagaaattaaggtttactcaaaggtagaccctgaacgtgaagttaaattaatgtcaaatggtcatattgctgataacgttaagcatttgactccagctgatgttttagcttcaatcaattacttctttgcattgcaagatgaaattggtactactgatgatattgaccacttgggtaaccgtcgtattcgtcgtgttggtgaacttcttcaaaaccaatttagaattggtttggcacgtatggaacgtgttgttcgtgaaagaatgtcaatccaagatccttcaacagttactccacaacaattgatcaacattcgtccaattgttgcaagtattaaggaattctttggttcatcacaactttcacagtttatggatcaacataacccattaggtgaattgactcataaacgtcgtatgtcagccttagggcctggtggtttgacccgtgaccgtgctggttatgaagttcgtgacgttcactatactcactatggtcgtttgtgtcctatcgaaactccagaaggtcctaacattgggttgatcaactcacttgcttcatatgcgattattaataagtatggttttatcgaaaccccataccgtcgtgtttcttggaaggaccacaaggttactgataagatcgactatttgactgctgacgaagaagataattacattatcgctggtgccaacactccattgaatgatgatggttcatttaaggagaagttgatcttggctcgtcaaaaggaagataacgtcgaagtttctccagataagattgactacatggacgttattcctaagcaagttgtttctgtcgcttcagcatgtattccattccttgaaaacgatgactctaaccgtgctttgatgggtgccaaccagcaacgtcaggctgcaccattaattaatccgcatggttcacttgttggtactggtatggaataccgtgctgcacacgattcaggtgctgctttaatcgctaaggctgctggtgtagttgaatacgttgatgctaatgaaatccgtattagacgtgaagatggtactttggacaaatacacacttgaaaagtaccgtcgttcaaataactctaagtcatacaaccaaactcctaatgttaaattaggtgatcatgttgacaagagtgatgtaattgctaacggtccaactatggatcatggcgaacttgctttaggtcaaaacccattgattgccttcatgacttggaacatgtacaactatgaagatgccatcatgctttctgaacgattagttaaggatgatgtttatacttcaatcagtattgaagattatgaatcagaagctcgtgacactaagttaggtccagaagaaattactagagaacttcctaatattggtgaggatgctttgaaggatcttgatgctgatggtatcgttcgtgttggtgcagaagtccacgatggcgacattttggtaggtaaggtaactcctaagggtgtaactgaattatctgctgaagaaagattacttcacgctattttcggtgaaaaagctcgtgaagttcgtgatacttcacttcgtgtaccacacggtggtggcggtattgttcaagacgttaaggtttatactcgtgaagccggcgatgaactttcaccaggtgttaacacaatggttcgtgtttacatcgctcaaaagagaaagattcaagttggggacaagatgtctggtcgtcacggtaacaagggtactgttgctgcagttgttccagaagaagacatgccatacttaccagatggtactccagtagatatttgtttaaacccaatgggtgttccatcacgtatgaacatcggacagcttcttgaattgcacttaggtgcagctgctcgtcaattgggcattcacgttgcaacaccagtatttgatggtgctgacgaaaatgacgtttgggacacagttcgtcaagcaggtgttgataaagatggtaagaccgttgtttatgatggtcgtaccggtgaaccattccacaaccgtgtatctgtaggtgttatgcactacttgaagttgacccacatggttgacgacaagatccacgcacgttcaattgggccttactcattggttactcaacaaccacttggtggtaaagcacaatttggtggtcagcgttttggtgaaatggaagtttgggcccttgaagcttatggtgctgcttacacattgcaagagattttgacttacaagtcagatgacgttgttggtcgtgtaaaggcatatgaagctattgttaagggtgaaaagattcctaagccaggtgttccagaatcattccgtgttcttgttaaggaacttcaatcattaggtttggatatccgtgttcttgatatgaaccataatgaaattgaacttcgtgatatggatgaagactcaagtgaacacttgaacatcgatactttgtcacggatggcagaagagcaagaaaagaagaagttagccgaagaaactggaaaatcagaagataaagacagtaaagaaaatgcagataagccggtagctcctgcagatgagtctgacgataaagtttctaaatagtaggaggttaaacttttgatcgacgtaaataagtttgaaagtatgcaaattggtcttgcatcacctaacaagatcagaagctggtcatatggtgaagttaaaaagccggagaccatcaactaccgtactttaaagcctgaaaaagatggcttatttgatgaaagaatttttggaccaacaaaagattggtcatgtgcttgtggtaagtacaagggcgttagataccgtggtatcgtttgtgaccgttgtggtgttgaagttacttcttcaaaggtaagaagagaacgtatgggtcatattgaattggctgcacctgtaactcacatttggtactttaagggtatcccatcaagaatgggattagttttggacatttctccaagattacttgaagaagttatttactttgctgcatacattgtaattgatccaggtgatactgaccttgaacctaagcaattattaactgaagctgaataccgtgaacaaaaagctaagtacggtaaccgttttgaagctaagatgggtgctgaagctgttcgcgaattgcttaagaaagttgaccttgataaagaagttaaggatttgaagaaagaacttcaaactgccactggtcaaaaacgtacgcgtgcaattagacggttagatatcttggatgccttcaagaattcaggtaacaagcctgaatggatggtaatggatgccgttccagtaattccaccagatcttcgtccaatggttcaacttgaaggtggccgttttgcaacttcagatttgaacgatttgtacagacgtgtaatcaaccgtaacaaccgtttgaagagattgcttgatttgaacgcacctaatattattgttcaaaacgaaaagcgtatgcttcaagaagctgttgatgctttaattgataacggtcgtcgtggtcgtccagttgttggaccaggtaaccgtccattgaagtcactttcacatatgcttaaggggaagcaaggacgtttccgtcaaaacttgcttggtaagcgtgttgactactctggtcgttcagttatcgatgtttcaccaaaattgaagttctatcaatgtggtgtgccacgtccaatggctttggaattgttcaagccatttgtaatgcatgaattagttaaacgtggaattgcatcaaacatcaagaatgctaagcgtaagattgaccgtgaagatgacgatatctgggatgtacttgaagatgtgattaaggaacgtccagttcttttaaaccgtgcacctactcttcaccgtttgagtattcaagcctttgagccaatcttggtaccaggtaagtcaattagacttcacccattagcttgtgaagcctacaatgccgacttcgatggtgaccagatggctattcacgtaccactttctgatgaagctgttgctgaatcaagattgttaatgttggctgctcaccacattttggctcctaaggatggtaagccaattgttactccatcacaggatatcgttttgggtaactactggttaactcaggccgaacgtggtcgtgaaggtgaaggtatgatcttcagctcaccagcagaagctgctgtagcttacgaaaatggcgatattcactaccataccattattggtatgtctgcagatgctatgcctaaaaagccatggcctaagggacatgaacacggcatctttattaccacttatggtaagattgtcttcaatcaattgttcccagatgattacttctatatcaatgaaccaactgaagagaacttgaacaatccgttggatgctaagtacttcttaggtgaaggcgaagagattgataagaagatcgatgaagtaggcgatgatttaatcgctagtccatttaagggaagcttcttgtcagattctattgctactatttacaagtattacaaggttcaaagaacttcagaatacttggatgatttgaagaagttaggctacactagctcaactacttcaggtattactattggtatgactgacgttccagaaatccaagataaggatgaaaaggtagccaaggcacgtaaacaagttgatgttgtttctaagcaatttagacgtggtttgattactgaacaagaacgtcacgaccgagtaattagtatttggaatgcatgtaaggacaagatccaaaacgaaattgcacaaattcacgcacctcgtaatccaatttcaatcatggcagactcaggtgcccgtggtaacatttctaactttactcagttagccggtatgcgtggtttgatggccactcctaacggtggtttgttcgaaattcctgttacttcaaactttaaggaaggtttgtcagtattggaattgttcatgtccactcacggtgctcgtaagggtatgactgatactgcattgaagactgctcagtcaggttacttgactcgtcgtttggttgatgttgctcaggacgttattattcgtgatgacgattgtggtactgatcgtggtattacagttagtgccatcatggaaggtgacgaaatgatcgaaccattatttgaccgtttggttggtcgtttcactgctgagactgttaaagatcctgaaactggcgaaactattgtcggcagagatgtcatgatggatgaaaacatggcacacaagatttgtgatgcaggtgtaactcacgttaagattcgttcaattcttacctgtgatactcctcacggcgtatgtcgcaagtgttacggtatgaaccttgctactggtgaagaagttgaagttggtgaagcagttggtactgttgctgctcaatcaattggtgaaccaggtactcagcttactttgagaactttccacaacggtggtgttgccggtgctgaagatatcactcaaggtttgcctcgtgtgcaagaattgtttgaagcacgtaaccctaagggtcgtgcaaccatttctgaagttgatggtgtaattgattcaattcaagaaaacccagcagaacatactcgtgaaattactgttaagggtaagattgatactagaagctacagtgttccttatacagcttcagttgctgttagcgaaggtgactacgttcatcgtggtgacaagttaactcttggttctgttgatcctaaggaattgattcaagttactgatacattaactactgaaaagtacatcttagctgaagttcaaaaggcttatagaatgcagggtgtagacattgccgacaagcacgttgaagtgttaactcgtcaaatgctgcaaaaggttcgtgtccttgatccaggtgaaactgacatcttgccaggtgaagttatggatattggtcaatttagagaccgcaacaaggaagttattatttctggtggtattccagcaactgctcaaagcgttatcttgggtattactaaggctgctttggaaactaacagtttcttgtcagctgcttcattccaggaaaccacacgtgttcttactgatgcatctattagaggtaagaatgatccacttcttggacttaaggaaaacgttattatcggtaaaattattccagctggtactggtatgcctgtataccgcagcatggaacctgaagctgacgttaagaagccagattcagtatactcaattgctgatattgaaaagcaaatgaaagaaaaggataaagctaagcaagactaagctttattgaaaataaataagcatttccaatcttttaagagcgggaatgcttatttttttgtctaaaaaattaattgggttagtactaatcctaggaaaatatatggaataaatggatagcgatggttaataggagttttttcaataagaaaaattgcaattaccaagattgaagcaaatagaaaaactaaattggcaaatgatggggtgaagtagcaagcgataattaagtaaattaataaatcgcctagccccatttttctttgcattatgctatagctaaaaattcctagcaataatgtaaaagagatccagtcgattaatgtaaaagctgcaaattggttgaataaaatcgcaacgctaatggctggaattagtaggagaagatcaaattcttgcttttgataatcagagattgcaacgactaaaagcgaaaaaagcaaaatagcggtaataatgtcctgtgtcttactaaaatcgagtaaacaaaaggcaaagccgccaattaattcaaataaaaataattcaactggaatttgttgataacaataacgacattttccttgaagaaaaagataagataataatggaatttcatccaaaattgataattcaaggtgacagttgttgcactgagaacgtgagtaaataaaatttttatcattccagtgctcgtaaactactgctgcgtgagaagccaagcaacttccaattataaagttagtaaaaataaataagtatttcaaaaaaacacctccactatttattacgcaaaaatagccgatttttctttttttattttgaaaaagtttgctttctgcttaaaaccgagtacaatagtctttgtatgttttgaacagtctattcgtgagtaaaaaagaaactcccggatgtgtgaacaaaatagtattttaggaggaaaaattaatgccaaccattaatcaattggtaagaaaaggccgtcattcaaaggtcactaagtcaaagtcacctgctttgaattacagctacaacagtatgaagaaggaatcagtattcaacccagctccacaaatgcgtggtgttgcaactcgtgttggtactatgactccaaagaagcctaactcagctttacgtaagtacgctcgtgttcgtctttcaaacttgatcgaagttactgcttacattccaggtgaaggccacaacttgcaagaacactcagttgtattaatccgtggtggtcgtgtaaaggaccttcctggtgtacgttaccacatcgttcgtggtgcccttgatactgctggtgttgatggcagaaagcaaagccgttctaagtacggtactaagaaagattaaaggaggagttaaataatgcctagaaaaggtcacgtaactaagagagacgttttagcagatccagtttacaactcaaagcttgttactaagttgatcaaccacttaatggtcgatggtaagagggctaaggcatcttcaatcctttacgatgctttcaacattgttcaagacaagactggtaaggaaccacttgatgtatttgaagaagctatgaacaacgttatgccagttttggaagttagagctcgtcgtatcggtggttcaaactaccaaatcccagttgaagtacgtcctgaaagaagaactactttaggtttaagatggcttgtttcatacgctcgtttacgtaacgaacacactatggatgaacgtttagctaacgaaattatcgatgcttcaaacaacactggttcagcagttaagaagcgtgaagatgttcaccgtatggctgaagctaaccgtgcatttgcacactaccgcttctaatttgttcgttttaatttaaggagagaataatttatggctaacaagcgtgaatttccattagcaaagacacgtaacattggtattatggcccacatcgatgcgggtaagactactactactgaacgtatcctttactacactggtaagatccacaaaattggtgaaactcacgaaggtgattcacaaatggactggatggatgaagaaaaggaacgtggtatcaccattacttctgcagctactactgcacaatggaaagaccacagaattaacatcatcgacaccccaggacacgttgacttcactatcgaagtagaacgttcacttcgtgttcttgatggtgccgtaactgttcttgatgcccaagctggtgttgaaccacaaactgaaaacgtatggcgtcaagctgaaacttacggtgttcctcgtattgttttcgttaacaagatggataagatcggtgctgacttcgataagtcagttaagtcattgcacgaacgtttaaacgctaatgcccatgctgttcaaatgccaattggttcagctgacacttttgaaggtgttatcgacttaatcaacatggttgccgacatctacgacgaagacaagcttggttctaagtgggatactgttccagttcctgacgaatacaaggaagaagctgaagcacgtcgtaacgacttaattgaagccgtagccgatgttgatgacggcatcatggaaaaattccttggcggtgaagaaatttctaacgatgaattaaaggcagctatccgtaaagctactttggacttgaagttcttcccagtttacgctggctcagccttcaagaacaagggtgttcaaatgatgcttgacggtgttattgactacttgccatcaccacttgacgttaagccttacgttgctcacaatcctaagactggtgatgaagttgaacttatggctgacgataagaagccatttgcagctcttgcattcaagatcgctactgacccattcgtaggtcgtttgactttcatccgtgtttacaccggttctcttgaatcaggttcatacgtattgaacgcttcaaagaacagtcgtgaacgtgtaggtcgtttgcttcaaatgcacgccaactcaagaactgaaattccagaagtattctcaggtgatatcgctggtgccatcggtttgaagaacaccactactggtgactcattaactgacccagatcacccacttattttggaaagcttgaaagttccagatccagttatccaagtatcagttgaacctaagtcaaaggctgaccgtgataagatggacgttgctttgcaaaagcttactgaagaagacccaactttccgtgctgaaactaacccagaaactggtcaaaccttgatttcaggtatgggtgaacttcaccttgacatcatggttgaacgtatgagacgtgaatttaacgttgatgctaagattggtgaaccacaagttgcttaccgtgaaaccttcaccaaggaagctaaagcacaagggaagtttgttcgtcaatcaggtggtaaaggtcaatacggtgacgtttggattgactttactcctaacgaagaaggtaagggttacgaattcgaagatgccatcgttggtggtgttgttcctcgtgaattcattccttcagttgaccaaggtttacaagaagctatgaagaatggtgttcttgcaggttacccattgatcgacgttaaggctaagctttacgatggtagttaccacgaagtcgactcatcagaagctgccttcaaggttgctgcttcacttgctttgaagaacgctgcttcaaaggccggcgcggttatcttggaaccaattatgaaggttcaagtaactactccagaagaatacttaggtgacgttatgggttcaatcactgctcgtcgtggtaccatggaaggtatggaagacagagccggtgctaagatcattaactcatttgttccactttcagaaatgtttggttacgcaactactttgcgttcatcaactcaaggtcgtggtacatttactatggtatttgatcactactcaccaacacctaaatcaattcaagctgacatcattaagaagcgcggcggagatgctgaatagcttccgttaagaactgattaatgcagttagcttaattgaaaacaatttcatataaaaaagagttatcatttttatttcaatgtcattaagttaagacattgacaaattgaatctaatctctgtagaaccgaatcattatgatttggttctttttttgcataaaataaaggcgaaaagaacctaccttttcgccctctgattaaattattaaaccttcaaaattattgccagaaagctggtgttaattatgaaagcccttcacagaaatattttagatcgtcttgatcaaattatcaatgatactggaaagcatattcatgattttatcgatgatcctcatgccttcactaggaagcggtttttagatgcagctacagtcattaaaactactattaatatgcaaggaaaagatttgaccagtgagttgtttagagcttttggccaaaaagctattaaaaataacgataaagtagtcagtacttccgcttatgtccaacgcaaaggtcagctttcacccgcatgttttaagcatattctaactgtatttaatcagaatttatttaatatccagttatttgatcataaatatcgtatatttgccattgatgggtctgattttaatcaaatctggaatcctaaatcagagaatatcgttggaaatctcaatcataaaggaaagccatattgccaaattcatgttaatgcactctatgacctgttaaataatacttatcaagactgcatctttcagcctaagtcaaagatggatgaacgtaaagccgccattcaaatgcttaaaaagctaaattgcggaccatatatagttactatggatcgaggttataccggctttaacatgattgaaaattgtaatcgcctgcctaactgttattatgtcatacgtactaaaacgggatatggcgcatttaaggaagtagctgagttgcctaatcaagagtgtgataaggatatagcttgctgggtgactacctctaattattattatgaaacccataaggctacagaaaacgttcatttggttaaccatcattaccgtcaatatataaaatatcggtctaaaaataccaaagatggcagctgggactttggagagttatgtacaataaaatttcgtgcctgtaaatttagaattaatgatcctaaatcaggcaaagaagaatgggaagttgttctaactaatctaaatagagccgattatcccttaaaaaggatcaaagagatctaccatttgcgctggggcattgaaacttcattcaaaaagttgaaatatgctttaggtagcgtacagtttcattccaagcaggatagatttattgaaatggagatctatgcccacatgattatgtttaacgcagtcagtcaaattgatgctcaagcatatgtaccacaaaaaaactgcaagtatcaatatgcgatcaatttcaaacagtcatgttttgtcatccaggctatgtatataatttcttcttcaactgaaatctttaaaaagattcttattcaaattagtcattacacaattccgatcagaccaggacgaaaagacaaaagaaatctcaaacccaaatcagctgtatattatttatatcgtgtagcctaatttctaaacaaaatttgggtttatttggcatgaaaaaagatcattcaaatgcgataaatcacaaatgaatgatcttaaaagtccaagtcgataatttgtcaatgtcttaacttaatgacattgatttttattttgataactctttttttgtaaataaatttaagaaaaaagtcgtaaacccttgatatttaaggagggacaaagtacaatagtctttgtgcttatgggacagtgtgcccttaagtgtgaaaattgttgtaaagcgttgacgcaaaaggttgcggcacgccaggctgcattgccacagtggcgtgcgggaaatttttgccgagcgagtcatcttttaaagaagacgttaaggaggtaatttaatggcaagtcaaacaattcgtattagacttaagtcttacgaacatggtattctcgatgaatcagctgctaagatcgtagctactgcaaagagaactggtgctgaaatttcaggtccagttcctcttccaacagaaagaactttattcacagttcttcgttcaccacacaagaacaaggactcacgtgaacaattcgaaatgcgcactcacaagcgtttaatcgatattttgaatccaacaccaaagactgttgattcattaatgaagcttgatcttccaagcggtgtagacatcgaaattaaactgtaatttaaatagaaagaggtgtaaacatgaccaaaggaatcttaggaagaaaagttggtatgactcaaatctttactaaagatggtgtccttgttcctgtaactgttgttgaagcaactcctaacgttgttatgcaagttaagactgttgaatcagatggttacgaagcagttcaattaggttaccaagacaagcgtgaagttttgagcaacaaaccagaaaaaggtcatgctgataaagcaaagacttcgcctaagcgcttcattcgggaaatccgcggtgttgagcttaaggactatgaagttggctcagaagttactgtggatacatttaaggaaggtgacgttgtaaacgttactggtacttcaagaggtcatggataccaaggtaacatcaagcgttggggccaatcaagaggaccagaaactcacggttcaagataccacagaattcctggttcaatgggttccatcattaaccgtgtaccaaagggcaagcgtttgccaggtcacatgggtgtgaagaaagttaccattgaaaacttagtaattgaaaaagttgttgcagacaagaacgtattgatgattaagggtaacgtcccaggtgctaagaactcattaatcgttgttaaaactgcttctaaagctgtaaaggctgataaataggaaggaggactagaatggctaatttaaaagttatggatcaaaacggtaaagactctggtgaagttactttaaacgataaggtttttggtattgaaccaaatgaaagtgtcgtttttgaagcaattattagacaaagagccggcaagcgtcaaggtacctcaaaggttaagaatagatctgctgttcgcggcggtggtaagaagccttggagacaaaagggtactggtcgtgctcgtcaaggttctatcagagctccacaatggcgcggtggtggtacagtctttggcccaactccacgttcatacgcatacactatgccaagaaagcaacgtcgtttggctattaagtcagttctttcccaaaagttgattgacaatgatttaattgttttagataagttgactatgtcagctcctaagactaaggaattagtatcaatgttaaacggcttaaatgctgacggtaaagttttaattgtttcagatgataacaatgtacaactttccgcaagaaacttgactaaggttaaggttgttccagttaatggcttaaacgttgaagatgctgttaactatggcaagttgatcttagatcaagatgctgttaagaagatcgaggaggttttggcttaatggacgcacgcgatatcattttaagacctgtcattactgaaaagtccacgaacttaatggatgataagaagtacacattcgacgtgcttttaactgcaaccaagacacaagttcgcaatgctgttgaagaaatcttcgatgttaaagttaagaacgtaaacattatgaacgttcgcggcaaggacaagcgagtaggtcgttacactggtaagaccgctcgtcgtagaaaggctatcgttactttaactaacgattcaaacgacatcaagattttccaagacgataacacagaagacaacaagtaataggaggtcagtcaattggctattaagatttacaagccaaccacgaatggtcgtcgtcatatgacttcttccgactttgctgagatcactaagacaaagcctgaaaagactttacttgaatctcaatcacatactgcaggtcgtaactcatatggtcatatcactgtaagacaccgtggtggtggtcacaaacaaaaataccgtatcatcgactttaagcgtaacaaggacaacgcaaaggcagttgtaaaggctatcgaatacgatccaaacagaactgctaacattgctttgcttcactacactgatggtatcaaagcttacatcttagctcctaagggcttaaaagttggcgatgtagttgaatcaggtgattcagttgacattaagccaggtaacgctttggaattaaagaatatcccaactggtacttcaattcacaatatcgaattaatgccaggcaagggtggccaactcgtaagaagtgctggtgcttcagctcaagttttaggtgctgatggtgattacactttagtaagattacaaagtggtgaagttcgtaagattttgtcatcatgccgtgcaactatcggtactgttggtaatgaacaacactcattgattcaattaggtaaagctggtcgtaaacgttggttgggcaagcgtccacaatcacgtggttctgtaatgaaccctaacgatcacccacatggtggtggtgaaggtaaggctccagttggtcgtcctcaacctatgactccatggggtaagaaggcacgtggtattaagactagagataccaagaaggccagcgagaagttaatcattcgtcaccgtaaaggtagcaagtagtagaaggagggttaattaatgagccgtagtattaaaaaaggtccttttgctgatgcatcattgttaaagaaggttgatgcacaagcagatgcagataagaagcaagttattaagacttggtcacgtcgttcaactattttcccttcctttgtaggtttgactatagctgtttacgatggtagaaagcatgtcccagtatatgtaactgaagacatggttggtcataagttaggtgaatttgttccaacaagaactttccacggacacaaatccactgatgataaagccacaacacaagcttagaggaaggagaaacatctaaatggcagaacaaattagttcagctaaggctgaagcaagaactgttcgcatcgctccaagaaaagctcgtttagtcgttgacttaattcgtggcaagagcgttgctgaagcattagcaatcttggaatttacgcctagagctgcttccccaatcgttgaaaaagttttacgttcagctattgctaacgcagaacataactacgatcttgaaagtgcaaacctttacgtatcagaagcttatgtaaatgaaggtgcaactttgaagagattccgcccacgtgctaagggtatggcttctccaattaacaagagaaccagtcacgtagttgtagtagtttcagaaaagaacgattaagggaggtatattaatgggtcaaaagattaacccaaacggttttcgtctcggtgttatccgtgattgggaatcaaaatggtatgctgacaagggatacaaagaaactttaaatgaagaccttcaaatcagaaaatttatttcagaaaagttgaaggatgcctcagtatctactgttgaaattgaacgtgcagctaacagaatcaacatttcaattcatactgctaagccaggtatggtaattggtaaaggtggttctgaagttgaagctttgagaaaacaattaaatgctttaactggtaagcaagttcacattaatattgttgaaattaagaaaccagatcttgatgctaagttagtagcagatagtattgctcgtcaacttgaagctcgtattgctttcagacgtgctatgcgtcaagctactcaaagagctatgcgtgctggtgccaagggtattaaggttcaaacttcaggtcgtttgaacggtgccgatatggcaagaagagaatggcacacagaaggtcgtgttccattacaaactttgagagctgatattgattacgcttgggtaaatgccttcactacttatggtgaaattggtgttcaagtttggatcaaccgtggcgaaatcttacctactcgtaagaataagccagcttcaaagccagcgaagggaggaaatagataatgcctttagtaccaaagcgagtaaaacaccgtcgtgaattccgtggtaagatgcgtggtgctgctaagggtggtaaatatattgcctttggtgaatatggtcttgaagccctcgaatcacattggattactaaccgtcaaatcgaagcagctcgtgttgctatgactcgttacatgaaacgtggcggtaaggtttggatcagaattttccctcaaaagtcatacactgctaaaggtgttggtgtacgtatgggttcaggtaaaggtgcaccagcaggttgggtagctgtagttaagagagaaaagattatgttcgaaattggtggtgttgatgaagcaactgctcgtgaagctttacgtcttgcttcaactaagttaccaattaagactaagtttgtaactagaagttcggaagtaggtggcgaatctaatgaaggctaaagatatcagagcattaaccactgatgaaatgttagaaaaagaaaagcaatacaaagaagaactcttcaatttgcgtttccaacaagcaacgggtcaattagaaaataccgctcgcttgagcaaagtccgcaagaatatcgccagaatcaagactattctgagcgaaaaagcgttagaaaacaattaatggaagggagctattaacttgagcgaaacaaacgaaagaaatcgtcgtcacgtataccaaggtcgtgtagtttctgataagatggacaagactatcgttgtagttgttgacacttacaagaaccaccctgtttacaacaagcgtattagatattcaaagaagtactacgcacaagacgaaaataacgaagctaaagttggcgatactgtacgtatcatggaaacccgtccattatctcgtaagaagcgcttccgtttagtaaagattgttaagaaatctgtttaatttgcggatttagtgaggggaggattacacagtgattcaaaacgaatcccgtttaaaggttgctgataactctggtgccagagaacttttagttattagagtcttaggtggttcaaagcgtaagaccggtaacattggtgacatcgtagtatgtactgttagacaagcaacaccaggtggcgttgtcaaaaaaggcgacgttgtaaaagctgttattgttagaactaaatcaggtgcacgtcgtgaagatggttcatacatcaagttcgacgaaaatgctggcgtaattatcaacgcagacaagagcccacgtggtactcgtatctttgggccagttgcacgtgagttacgtgagaacgactttatgaagatcgtctctcttgctcctgaagtcttataattgatagtgaggtgcactgatgttcgttaaaactggtgacaaagtaaaagttattgccggaaaagataaaggtaaagaaggtactgttctttctgttaacgttaagaaaaaccgtgtagtggttaagggcgttaacaagattaagaagcatcaaaagccttcacaaagcaatgctaatggtggtgtagttgaatcagaaggttcaattcacgcatcaaacgttaaagtaattagtagtaaaaaagaagataagtagaagggaggacacacatggcaagttatttagctaaggaatacaacgaaaaggtagctcctgcattagaagaaaagtttaactacaagtcatctatgcaagtacctaagatcgacaagattgttttaaacatgggtgttggtgatgcagtttctaacgccaagaacttagatgaagcagttgaagaattaactttgatctcaggtcaaaagccattaatcactaaggccaagaaatcaatcgctaacttccgtttacgtgaaggtatgtctatcggtgctaaggtaactcttagaggcgacagaatgtacgatttcttgtacaagttaatcaatgtttctcttccacgtgttcgtgacttccgtggtgtatcaactcgttcatttgatggtcgtggtaactacactttaggtattaaagaacaattgattttcccagaaatcgattttgataaggtaaaccgcactagaggtttagatatcgttatcgtaactactgccaacactgatgaagaagctcgtgaacttttgactcaatttggtatgccgtttgcaagatagtggaggacattaatggctaaaacatcacaaaaaattagaaatcgtcgtcctgctaagttctcttcacgcgaatatacacgttgcgagagatgtggtcgtccacactccgtataccgtaaattcgggttatgccgtatttgcttaaaggaattagcacacaagggtcaaatccctggtcttaaaaaggctagttggtagtatacggttaggaggatagcttaaatggtcatgacagatccaatcgcagattacttgactagaatcagaaatgccaacatggcaaaacacgattcagttgaaattcctgcatcaaacattaaaaagtctatttcagaaattttgaaacgtgaaggcttcatccgtgattacgaagttgcagatgataacaagcaaggcgttatcaaggtattcttgaaatatggtccaaatggagaacgtgttatctcaggtttgaagcgtatttctaagccaggtcttagaaactacgttggcgctgaagacttacctaaagttcttaatggcttaggcattgccatcgtttctacttctgctggtgttattaccgacaaggaagcaagacaaaagaacgttggcggcgaagtaattgcctacatttggtaatactgacagaaaggagaacaatcaatgagccgaatcggtttaaagactattgaagtccctgacagtgtcactgttaccaaggaaggcgacaatattactgttaagggcccaaagggtgaattaactagatacttcgatccaaagattaagtttgaacaaaaagatggtgaaattaacttttcacgttcaagcgaaagcgacaaagcacttcacggtactgaaagagctaacttagcttcaatgatcgaaggtgtagttgacggttataagaagactttgaagttaatcggtgttggttaccgtgcacaagcacaaggcaacaagattactttaaatgttggttattcacacccagttgtattgactgcaccagaaggtgtttctgtaaaggcaacttcagcaactgatgtagaagttgaaggtgtttcaaagcaagatgttggtcaatttgcagctgaaatccgtgccgtacgtccaccagaaccttataagggtaaaggtattcgttatgttgatgaatacgtacgtcgcaaggaaggtaagactggtaagtaataagtagttatttttgaggtgaaattgtgatttctaaaccagataaaaacaagttacgcttaaagcgtcatagacgtattcgtggaaaaatttctggtactgctgagcgcccacgcttaagcatttttcgttcaaataaaaacatctacgctcaattaattgatgacgtagcgggtgttacgcttgcaagcgcctcaactttggatgaaaatgtatcagatgcaactaaagtagaacaagctgctgctgtaggtaaggcaattgctgaagctgcaaaggcaaaaaacatttctactgttgtattcgacagaagtggttacttataccacggccgtgttcaagcattagctgatgctgctcgtgaaaacggattagatttctaggaaaggagaattaacacatggcaaaccgcaatgattctcgtaacaatcgcagaaacaaagacgatatcgaagatcaattagtcgctgtcaaccgtattactaaggttgttaaaggtggccgtcgcatgagatttgctgctcttgttgttgttggcgacaagaaaggccgtgtaggttttggtactggtaaagctcaagaagtcccagaagcaatccgtaaggctgtagaagacggtaagaagaaaatgatcaatgtacctaaagttggtactactattcctcatgaagttattggtcactacggttcaggtaacattttattgaaacctgctgaagctggttctggtgttgctgctggtggtgccgtacgtatcgttatggatatggctggtatctcagacgtaacttcaaagtcacttggttcaaacactccaattaacgttgttcgtgcaactatcgatggtttgaagaagcttagaactagtgaagaagttgcaaaacttcgtcaacctgaaagagcttaagattagggagatcatagatgactgatttaaagattactttaattagaagtgttgctcaccgtctacctcaacaaagaaagatcgttaaagctcttggtttaggtagagtggatagtactgttgttcttccagacaacgctgctactcgtggtgcattattaaagattgctcacttaatctctgttgaagagattaacaaatagaatatcaaggaggtgccaaattaatgaagcttcatgaattacattctgctgaaggctcacgtcgcaatagaaaacgtgttggtcgtggtacttcaagtggttacggtaaaacttcaggccgtggtcaaaagggtcaattagctcgtcaaggcggtcatactcgtttaggttttgaaggtggtcaaatgccattattcagaactatgcctaagcgtggttttaagaacattaaccgcaaggaatatgcaattgtaaacttagatgatttaaacaagttagaagacggcagtgaagtaactgtagaatcacttaaagataatggcttagtaaagaaagaattgtcaggtgttaagttacttggcaagggcgaattaaaagttaagttaactgtaaaggttaataaagtttccgcatctgctaagcaagcagttgaagccgctggcggaactgttgaggtgatctaatgttttcgaccttgaagaacgccttcaaagataaagaaattagaaataagctctatttcacgctctttattcttttgctgtatcggatcggtgcaaacattaccgttcccggtgttaatgcgaaggcgatcacgcaggttgcgcaaactggtttagttccaatgctggatactgtatctggtggtggactagataactattcaatattttctttgggtgtttctccttatattacggctcagattgttatccagctgctacagatggatattgttcctacgttagtagaatggggaaaacaaggtgaagtaggtcgacgtaaaacaaatcaagtaactagatatttagcattagttgttgcttttatccagagtattggtattacgttaggctttaacgctttaactcaaatgggtttggtaaagaatcaaacaccacagacttatatagaaattgctattattatgactgctggaactatgttattaacatggttgggtgatgaaatcactgataagggtctaggtaatggtatctcagtaattatttttgctggtattattgcaagactaccaagtggtctatggcaaatttataaggaagaaattattaataatagtgctagtgatcgttggcaaggcattttgttcttcatcgcggttatagttgcaatccttatcgtaactcaatttgttacatgggttgaacaagctgatcgtcgtattccaattcaatatacgagaagagcgacgatgagtggttctgaaagttttctaccattaaaggttaatgtatctggagttattccggttatttttgccagttcatttattgttacaccggcaacgattttaatggcctttcaaagaacccagggcgatcaacaatggtttaaagtaatgaaccaaatctttagcttacaaactactcctggggtaattatctacactcttttaattatcttatttacattcttctacgctttcgtacaggtcaaccctgagaagctagcagaaaacttacaaaagcagggtgcttatattcctagtgtatggccaggaaaagatactcaggattatatttcaaagatgttgatgaaattatcaacagtaggttcattattcttgggcttagttgctttactgcctcaattggctactaacttttggaatctcccaagttccattggtttaggaggaacaagtcttttaattgtgattggggttgttctcgagttatctcgtcaaattaacggcttgttaatgaagagagaatatgttggattcatcagataggaacggataaatgattaacttaattcttttagggttaccaggtgctggtaaaggtacagcatcagagcgaatcgttgataaatatcacttaactcatatttcaactggggatatgtttagggaagcaatggctaacaagacgaaggttggtcttgaagctaagagttatatcgataagggtaatctagtacccgatgaagttactgcaaagttggttgaggaacgtttaagtcaacctgatattaaagaaggttttatcttagatggttttccaagaaccactgtacaagcagaacttttagatggtattacaaaacgtttggagaaacctttaacaaatgtcattgcgcttgaagttgacgaagacactttgattaagcgtttatcagcaagatacatgtgtaaaaattgtggagctacttacaacaagctttccaagcagccaaaagttgagggcacttgtgatcgctgtggtggccatgaattttatcaacgtgaagatgataaaccagaagttgttaagaatcgtcttgaagttaatgaaaagatgaatgcacctttgaaggacttttatcagaagaaaggcttgctcactgtaattaatggtgaacaaactccagaaaaagtctttgaagatattgatgcggtattgagtaataatcaatagaagaaaaatttgtataattttttatccgtgttataatttcaaagtatatgactgtttaattgcggaggaacaactttggcaaaagatgatgtcattgaagtagaaggtaaggtagttgataccttacctaatgctatgtttaaagttgaattggaaaatggagccacaattttagcacacgtttctggtaaaattaggatgcactacattcgtattttgccgggagaccgtgtgactgtggaattatctccatatgatttaactaaaggtagaattacgtatcggtttataaagtaatataacggagggaaacatgaaggttagaccatctgttaaaccaatgtgtgaacattgtaaagttatcaagagacatggccgtgtgatggtaatttgctcagcaaatccaaagcacaagcaacgtcaaggttagaaatagagggggtgtagtttatggctcgtattgctggtgttgacttaccaagagataaaagaatcgttatcgctttaacttacatttacggtatcggtgaagcaactgccaagaaaatttgtgctgatgctggagtatctgaagatattcgttcaaaggatttaactccagaagatcaagaaaagcttcgtgctgaagttgacaagtaccgtgttgaaggtgacttacgtcgtgaagtaagcatgaacattaagcgtttagttgatattggttcttaccgtggtattcgtcaccgccgtggacttccagttcgtggccaaaataccaagaacaatgctcgtactcgtaagggtactaagagaaatcgttaattttatttataaggaggtttattgatgcctgcaaagaaaacagcacgtaagcgtcgtgtgaagaagcatgttgaaagcggtgtagcacacattcactcaacgtttaataatactttagtcatgattactgacgttcaaggtaatgcagttgcttggtcttcagctggtgcattgggctttaagggtagtcgtaagtctactccatttgcagctcaaatggcagctgaagcagcagctaagagtgcaatggaccaaggcatgaaacatgtagaagtttcagttaaaggtcctggtgctggtcgtgaatctgctattagatcacttcaagcaactggtcttgaaattactgcaattcgtgacgttacgccagttcctcacaatggttccagaccaccaaaacgtcgtcgtgtttaattttgtccttgatataggacgtaacgttttgaaaggggcccagtaatgattgaatttgaaaaaccaaatattaccgttgttgaacaagaagattcttacggtaagtttgttgttgaaccacttgagcgaggctttggtactactttaggtaattctttaagaagagtattacttacttctattccaggtactggacttgtttatgtgcaaattgatggcgttttacacgagttctcaacagttcctggcgtcagagaagatgtaaccaagatcatcttgaacttgaagaaacttgaattaaagtctctttcagatgaacaaaaggttattgaattggacattgaaggtccagccacagtaactgctgatgatcttaaagttgatgcagacgttcaagtcttgaatccggatcaatatatttgtaccattgctgaaggtggacacttgcatatggaacttgccgtaaagaatggtagaggttatgttgctgcaagtgacaataagagtgatgacatgccaatcggagttatcccagttgactctttattctcaccaattaagaaggttaactaccaagttgaatcaactcgtgttggtaagagagatgactttgataagctcacttttgagatttggactgacggttcaatcaagcctaatgacgcccttagttttgctgctaaaattttagttgaacactttaaggtatttgaatcagcagatgcaaatgctaaattcagcgaagtaatggtggaaaaggaagacgataagaaggaaaagaagcttgagatgactatcgaagagcttgacctttctgttcgttcatataactgcctgaagcgtgctggcattaatactcttcaagagttaactgacaagacagaatcagatatgatgcgtgtacgtaacttaggacgtaaatcattggaagaagttaaaaataaattaaccgacttaggtctttcacttcgtcaagaagactaagcttaggtgaataaaggaggcaaatccatggcataccgtaaattaggtcgcgatagtgctcacagaaaagcaatgcttagagaaatgactactcaattaatcatgaacgaacgcattgttactactgaaactcgtgctaaagaagttcgtaagactgccgaaaagatgatcactttaggtaagcgcggcgatttagcagctagaagaaaggctgctgcatttgtacgtgacgaagttgcagatgttcacgaagaaaaagatgcagttgttgttaagtcagcattgcaaaagcttttcagtgatgtagcacctcgttacaaggaacgtaatggtggttacaccagaattttgaagttagccgttcctcgtaagggtgacgctgctccaatggttattcttgaattagtttaatttagagtaacacaacttaatacgtattaagaattatccatgaaagtgagaataagcgtaaagatgatggcgcaagcttagtctagcttagatgataaaaatcatccctcttcatgggtgattttttttgctctttttttctgttacaatatgctaataagcgatttaagaaaggaagtggaaaaatgccagtagatagtgctgttgaatttaaggatgtctcatttacctatcccgatactaaaaaagcgattcttgatcagattagttttaaaataaaaagaggttcctggacatctttgataggtcacaacggtagcggtaagtccacaatttctaaattaattaatgggttacttttgcctgattctgctaataattctagaatcactgttttaggaatgacgttaaatcaaaagacagtctgggatgttagggaaaaagtcggtattgtatttcagaatccagataatcagtttgttggagctactgttggcgatgatgttgcttttgggcttgagaatagagctgttcctcgggagcaaatggtaaaaatagtcagaaaagttttagcagacgttggaatgctggattatatagatgcagagccagctaatctttctggtggacaaaagcaaagagtagcaattgcaggtattctcgccgtagaaccgaaaattattattttagatgaatcaacttcgatgcttgatcctaaggggagagagcaggtgctaaaaattattaagcatttaaagaaagagaagaatttgacagttatttcgattacacatgacattgatgaggctaatatggctgatgatgtgatcgtcttaaatgatggcaagattttagctcaaggaactccaacggaaatttttagtaaaactgaaatgttgcaagaaatagggctagacattccatttgtacaaaaattaataaataaattaaatgaagtgggaatttctgtacctaaaaatataaaaacgaaagatgagttgaaacaatatctatgtcaattaaatttgaaaaagtaaattatatctattctcccggaacttcaatggagaaaaaaggattagataatgtttcatttgaattaactgaaaatagttttgttgcattggtaggtcataccggtagtggtaagtcgactttgatgcagcattttaatgcattactgaagccgagttcaggaacaattgatattgctggttatcatattactgctcaaacaggaaataagaatttgaaaaagttacgcaagcgggttagtttggtttttcagtttcctgaagcacagctttttgaaaatactgtgcttgaagacattgaatttggtcctaaaaactttggagcaaccgatgatgaagctaaaagtaaagctttgaaatggttgaagcgagtaggattggataaatcgctagcaaataagtcgccatttgagttatctggaggacaaatgcggcgtgttgcaattgctggggtaatggctgatgaaccagaaattttatgcttagatgagccagcagcggggttagatcctaagtctcgtaaggaaatgatgaaattatttgttgattatcaaaaagcaggtcatactgtaatcttggttacgcataatatggatgatgtggccgaatatgcagatgatgttttagtgatggaacatggtaaattaattagacatgatgcgcctaaggcgatttttactaataaaaactggctagaaaagcactatttgagtgaaccaacggctagtctttttgcctcagatttgacgaactttaactttaaagataaaccgttaacactggatcagcttgttaatgaaattaagaaaaatttgcgagggtagtttatgagtaagataattgtaggacgttatattccgggagattctcttatttataaaatggatcctcggagtaaattattagttaccatattatttatattggctatctttttagctaataattcaataacttatgcgattgtgaccattttttgcttcttagctgtagttgctacaggattaaatgtaaaagtattttgggatggcgttaagcctttgattggtttaattttctttacgtcgcttttgcaattgttttttatgactggtggtcatatttattggcattggtggattttttcattatctagctacggtttgattaatgcaatctatatttttattcgttttacattaattattttaatttcaacagtaatgacagttactacaatgccacttgaaattgctgatgcgatggaatggctgcttaagccgcttaagttgtttaaagtgccggtggataaaattgcgttagtaatttcaattgcgcttcgttttgtaccgactttgtttgatgagacttttaaaattatgaatgcgcaaagatcacgtggagcggacttcaatgacggtggtttaattcaacgtgctaaggcaattacgcccattttggttccgttgtttattcagtctttagaaacggcaattgatttatctacagcaatggaatcacgtggttatcgtagtagtgaaggacgaactaaatatcgcgttttaagttggtcaaaatatgatttaattgcattattttattttgtactgttagtcggattactattaatttttaggacacattagaaatatgacaacaagatataaaatgacgatggcttatgatggtcatctttttcatggctttcaacttcaaccagaccagcgaactgttcaggggacaattgaagatgcgttgaagaaaatgactaaggggcagcgtgtgattgtgcaggggtcaggtagaactgatgccggtgtacatgcggttggacaggtaattcattttgattatcctggtaaaactattccagccaatcgaatgattttggcaatgaattctatgatgccaaccgatattatctttgatgattgccaaattgttgatgagaattttcatgcgcgttattcgattaaggggaaatggtatcgctatcgtgttagtttagatcattttgttaatccttttaagcgtttttatactggtcattttccgtatccattagatattgaaaaaatgcaggttgcagctcaggacttattgggtaagcacgattttaccagttttgcggccagcggtggtcaaattgaagataaagttcggaccatttattatgtaaacattactaaagacgaaaaagaaaatgaagtaatttttgattttattggttcaggctttttgtataatatggtgcggattatggtagcggcgctactggaaattggtaatgatcgtaggccaattcatgacttgcaacgagtaattgctgccaaggatcgtcaagaggtaagacaaactgctcatgcgagtggtttgtacctttatcatgttttttacgatgaaatcccacaaaaatatcgtttagaacagcatttataattgactttttatctaaaaggacgtactctagtatagtatgtttgtccacgataggccccggaaacttattgttttcaaactgcaaataaacggaggaatttaaattgcgtactacaccattagcaaaatctagtgaaatcgaacgtaagtggtacattattgatgcaactgacgtaactcttggtcgtctttctgcagctgttgccactattttgagaggtaagaacaagcctcaatacacacctaatgttgatactggtgataacgttatcgttatcaacgcatcaaagattagattgactggtaaaaaggcttcagacaagttctactaccaccactcatcatggcgtggcggcttgaaggccgtatcttacggtgaattgcttgctaataacccagttaagatggttgaaatctcagttaagggtatgcttccaaagaacactcttggtcaccatgaattcatgaagatgcatgtttatgctggcgaagaccacaagcacgaagcacaaaagcctgaaaagttagatattaacaaattaatctaggaggttatacaatggcacaacaagctgcatatacaggtactggtcgccgcaaggattcagttgcgcgtgttcgtttagtaccaggtaacggtaagatcactgttaacgataaagatgttgatcaatacattccattccctaacttggttaaggacttgaagcaaccattaacattaactgaaactgaaggtcaatacgacattcacgttaatgttaacggtggtggtttctcaggtcaagctggggctatccgtcttggtatcgctcgtgcacttcttgaagttgacccagacttccgtagtccacttaagaaggccggtttcttaacccgtgacccaagaatgaaggaaagaaagaagccaggtttgaagaaagcccgtaaagcttctcaattctcaaagcgttaatatttacgttcaaaaatgttgttatatcaacgttttggagacttcagttggtcacctatggtcacaatgctatagggattccaatagatttaaagcattcgcatcttgcgagtgctttttttctggcattaattccagatagtatttttcagtagttaagattgaatcgtgtcctaatcttctgctaacataagataaaggaatattattactgaataaaaaagaagcgtgggtatctcttaaaccatgaaatgtggttgaagggatgcctatttttttgagcaattcttttaacataccagactgtttaaagctgaaccagtcaaacaaatagccagaatctttttgagagatatccttcaatagatcgtaaatattcttaggaatagtcacactgcgtctagaatgtttagtttttaatttagtatcgtcagtagtagggctaattgatcgttttacttcaacgcaataatactgaccatcgtaatgcacatcctcaggcttaatacctaaaatttcaccacgtcttaaaccagtactaatctcaagtaataccattaagttaaattcattatctgtatgttcaagtaagtaatgttttaacttagttagatcagacattgatgaagctttattgcgtttaggtaattcttttccgtgtgctttaagtaaactagcaaaatcattgtaaatgtatcccttaacataagcatagcggagagcagttctaattttcttaagtaattcagttaccgttttcttagaatgtgttttgccatatttatctaagatactttgcatttgtacgtcatcaagcttaccaagtttagcggttggaaaaagattatcaattactttaccagctttaacataattatcaaaagttgcttttctaacgtcatgtacttttactgtttgaacgaataaataataaaagtccttgaataaagtgttttgctgggctattgcttgacctttagccttttgtagttcaagagtagtactccaaactttagcttctttttcagttttaaaactcttagttaagtaatcacgttttccgagactgtaaaatagtttgtgtaaggatgaatgattccttaaatttatttctttaaacattagaaaaaggagttcctttctcgtatgattggtttgaacaaaaaaacacatacagaaagaagaactccttcatgaatgattttaccaaagattttgctcaagctctattcaatccagacaaaataaatgatttattgcgcaaagagctacaacaggctgttaataacttgctagaagctgagttgactgcctttctaggctatgatccctatgccagaaatggctggaatactggcaattctagaaatggtgcttatttccgcaaggttgatacccagtttggaccaattgaagtgcaagtgcctcgagaccgcaacggtcagtttcatcagcacacgctgcctgactacaagcagcactctgatgttttggaaagcacgattatcaagctatactccaaaggcgtaactaccagagaaatcgctgacttgattgagaaaatgtatggcagtcattatagtccagctcaagtatcaaatatttccaagcagatgctccccaagattgaggcttatcacaagcgcaagctaagcgacaagtttttctgtgtctatttggatgcgacataccttcctttgcgccgagaaacgtttgagcgtgaagcagtatatattgccattggcattaaacctaatggacataaggaagtcattgactactgcattgctcctagtgagaacattgaagtttggacagagatgcttcaaaacatgaagtccagaggcttgaagcaagttgagctttttctttctgatggtgttgttggcatgaaaacagccttggccaggacttatcctaaagctcattttcaacgctgcctggttcatgtcatgcgcaatatctgcgctaaagtacgcgtcgacgatcgtgaaaagatcatgaacgaattcaagcagatacatcaacagacaagcaaaaaagaagctgcagctgtcttgcacaaattctatgccaaatggaataaagcttatagccatgtcatcaaaggtttgaaggaaattgagcccgatctgctagtcttctacaattatcccaaacaaatcagagcttcaatttattcaaccaatatgattgaatcctttaacaacgtcatcaagcgtaaagctaagcctaaggcagaatttccaactgaacagtcgcttgatgcatttattggcatccaggcaatgagctacaatgaccgttatttcaatcgaattcataaaggctttggtcaggttcaggacaccttagaatcctactttgattaaataaataattaaaaaatcaatttacgagaaagatctatttacacaaaagatttgacagtttccgttttccatgttgatagattgttactctggctctatatgatgagccacgtttttcaatacttgccataaatttaatcgtcctttcaaaagaaaagccgattatcttaccagcaataaagttagcagataaccgactatttctcaaatctttttcaattttgtttctttaagatcgatgaaagcttcgatacttttaatggtaaagcgttctgtgtgttctcctagtttaaatcttttaaagtcaggatcagagcgaaatactttatcaaaagttttgggatcaataccaatatattttgaagcttcttcgcgagttaataatttagccactattattctcctgagattgtttagttaccaatattgagataaaatctaggtagtaggtaatctagtcattgcttttgtctctattagcatgactagtatttttttgcgattttatcttccaaattgcttcggataatttatcatcagtgattagatcatttttaactttattagtattgcttttagtaagttgcaacgggataattcgtcttttcaactgttcaaaagaatcaatgacttgattagcaatattacattcaagataaaaactaagtggatcataaggggtagtgatgtaaatggcacgcgcatttagataacgatcgtgataccttgcgggagccattttgtctatttcccaaggatccaaaagggtaagtagttgaccatagtcatagtcatttggtcgcaagtcattaattactatgaatttttgccctttgtattcttgaaagtgatcccgttgactacctgaaatacagaaatcttcaggatgttgtttttctaaaatttcccgtactaacttagtcttaccaattccggaaacaccatatatccagtagaccttacaactctgacctttgaagtcctttaaaaaccgttgatgctttttgtaagctaggatgtcttcaatatgatctaacagtgttttatgttttgccatctcaagaacaccgatttcttcttgaagttcttctttagtgattttttcatttgaataatcatcaataaagttttcaattgcttgtcgtgatggctttttgactttttgtctaatctcattgattctatctttaaaatcaaatgaagctactacttcttttggatcataatgatgtttactcttagcattagtagtttcatggatcagatagctatagccattgttaataatactgtgccatgcttcaatatattgttcatgatcattgaaaatcttagatactcttgaaatggttttagcatctttgaaatgaagcattacatgatagtgaggtcgaatcttttaacttatctttactaaatggtaaatgatctaaatcttgggtatacataaagttgtgagaacgtattatttttttcacaattaaagatttcctttctattcaacacgaactacatattaactttggggctagataacaagttcattattactttatttttgtttatcagatggaaagcaattgcaagaagcagcagatatattagccaaggctaaggtgcatctatctatggtgatattttcaccttaaatcaaactgcagcagctatggttaaagttgctcaaggaggtaataagggtaaagtattactgcaaatgaatgaagcttaagttaacatgaaataataaatacatttagataaagaaagaccctcaaagattctaaatttgaatttttgagcgtctttttagattgctaatcattttaaaggtacttgtattacatttactcctgctttaataaattcattaattacactgttttctacaaaagtatcagttattaataaatcaatatcttttattgttccaatagtaaaattagagaatttattgaacttgctatagtcggcaacaacaataaccttttgtgattgctgaataatagttttattaacttctgcttctcccataactggtgttgaaataccttggttaatgctaattcctgcgcaaccaataattgcatagttggcacgtaaagatagaaatgctttagttgccaaatcaccgctcatgattaatttatgatgtatttccccacctgttaagatcactttgcttttagtattttcaaaatttccagcataaccattgttagtaacaattattatatcctttgttaataaatgtggaattgcatcaaaggctgtactactagagttaataaatactatatctccatcgtgaatatatctggctgcctcttttcctaagctttgcttaatgtaactaacgggctgagataatgggatttcttctggtgcaacaagggatatgacaccacgcttttttgaaatcttacccatttttgacaaataatcacagtctcgtcgaatagtcatttcagaaaccttcatctttttgcttaattcagaaatagaaatttcccttgtgtgatttagtaaatcaatgatttgcttgcgacgttttttaattacttgaattgaatttttcatttttaatgatctctttcacttcaataaatacttactaatacttcaccagaaaagcattaacttttgaatttaaataaaaaacgacccgaactggttactattttaccattcaaaataataattcacatattttatgttataaatgacttgaattttgcaaaaattaacataaaatatgctaaattaacatatataatggttgaaagcactcacatctaagcgcataataacattgaagacgaggataagaaaattaaggaggatttattcatgtcagcaccaaaaaaaatagaagatgttaatttcaaaacttttgcagaaaacaatttcccagaatggggtacgttcttgaatgaacaaattgctgataagcaagtaccagaaaaaagtattgcaatgtggtggttaggctgtatgggggtttggattaagactcatgaaggcaccaacgttgctattgatatgtggaacggtactggtaaacatactcacggtgacggtaagatgcgtaaaggtcaccaaatgatgcgtatgaccggtggtgaagctttacaaccaaaccttagaaacaagccatatgtaattgatccatttgcacttcgtgatcttgatgctttatgtgtaactcacactcaccatgatcacttggatatttacactgcagcatgtgtaaacaagtattgcccagacgctaaatttattggacctcaaggcgttgtcgatgaatggatcgaatggggtgttccaaaggaaaagaccattgttgtaaagcctggcgatgaagtcaaggttggggccgcaactattaaggcaatggaagcctttgatagaactgaatttgttaccgaagatgatccaaacaagaagttagcaggtactatgccaattgaaatggctaaagttgctgttaactacttagttaagacttcaggtggtaacgtatatcactcaggtgactctcactattcaaacacttacgtaaagcacggtaacgaaaacgaaattgacgtaactctatgtgcatacggtgaaaacccacgtggtatcactgataagcttgacgactcacaagttttgagaatgggtgaagctttaaagacaaaagttattattccaatgcactatgacatttggactaacttctacagtgatcctaaggatattttagctctttgggaccgtaaaaagtaccgtttgcaatataaatttaagccatatatttggcaagttggtggtgaatttgattatccacaagacaaagataatttcgaatacatgtatgatcgtggattccatgatgcatttaagaatgatccagacttaccattcccagaaatgctatagtcccgtttttgttgattaactagctcaacgtctttaaccaaagctgttgagctgagggaggagacgctgatgttacgttactttttagaaaataatttattaaacattactgatgaacatcctgagacttgggaagaagcaattagagttgctggtaaggtaatgaagcaagacaagttagttactgatgattatattgattcagttattgctgatgttaagaaatatggtccatacattgttattgttcctggtgtggcaatgccacactcaaaggctgatagcgaaggagttttaggtactggtataggtcttacaattttgccagaaccagtttcattcgatgaatcagacccagataaaagtgcaaaattattctttatgctagcagctaaagataataatacacatgtcaaaaatattgcccatttatctgacatgttaatggaagataacatgattgatgatctttctaaggttaagaatttagacgattataaggcagtaatgaagaaacataatatgtgatatcggaagcggggagtataaatggctatattaaatattctatctaagatatgggattattttgctaccaatattttgcaacaaccagctttcatgattggttttattgtcttacttggttatatcttagagaaaaagaaatggtatgaggtcctttcaggcttcttgaaagcaacagttggatactttattttatcggctggttctgttggactgatcaatacttttagaccaattttagtcggattaaaagatcgttttcatttgaatgcgatggtaactgatccatattttggacagaatgcagttactgccggaattatgaaagagtttggtagatcttttgccgatactatgcttttgttgttatttgcatacattatcaatatcgtgttagtaagattttcaaaatatactaaattacgtgctgtttttacaactggtaacgtgcaagtacaacaagcggctaccgctttctggttgatcttgttctgttttccaaaattaggtcatttacctattttaatcgttatgagtattatcttaggtttatattgggccgttggttcaaacttaactgtagatattactcaagagttaactgatggtgctggctttgctatcgctcaccaacaaatgtttggtatctttattttcgctaaattatcagaatttttggaaaatagagccaaaaagaaaggtaagaaagaagccagacgattagaagatgtaaagttaccaggtttcatgtcaattttcaacgacaatatggtatctacatcaattttgatgttaatttttatcggtgcaattttagtagtattaggtccagattacttagttaaagctaaatttatgcaacctggccaaagttttattttctacatcttacaaacttcattacaatttgcagttttcttagcaatcttacaattaggtgttcgtacattcgttaatgaattgactgaatctttcactggtatttcagacaaatggttacctggctcagttcctggtatcgatgtcgcagctaccttaggttttggttcacctaacgcaggtacaattggtttcttgtttggtgcattaggacaattcacaatgatcattttattgttgattttccactcaccaacaattgttatcgccggatttatcccgttattctttgataacgctgctatcggtttgtattcaaataaccgtggtggtttcaaatatgcaatgatcatgccttttatttctggattgatccaaataggcgggtctgccttaattgctacctgggtaggtatggcgaaatacggtggttacatcggaatgttcgattgggctacagtttagccattcttcacagtattgatgaaattcttaggctttgttggtattgctcttgtaataatcattttggtaatgattcctcaattgcaatatcgtgccgataagaaaggttacttcatgattactgaagattatgaaggttggaagaagttacatggtaaagaatagaggttaattaaaatgaaaataatgtcagcttgtgctaatggttcgggaactagtttaatgctttctagaaccgcaagaaaagcaatggaacaattaggttatgaaattacagtttcagatcatacttctgtttcagaagctagaggaactgctagaaactatgatgtggtatttacatcattaccttttgtgaacatgtttgatgaagtaaagcaaaagggttgcgaagtaattggcgttaagaatgtaatgtcagttcctgaagtaaaagaaaagatcgaagcttcagatattccaaataagtttaagaaataatcttaggagaattaatttatggctttaccaatgttacaagttgctttggattgcgagagtactgctgaagctttaaatgtcgcaagacaagtaatggatcaagttgatgttttggagacaggaaccattctttgttatcaagatggtgtaaaggccgtatctgctttaagagcagtgggaccagataaaatagttttagcagatgttaaatgtgctgatgccgggactaagttcggtaaggcaagcaaagatgcaggtgctgattggatgacttgtattaacgctgctactgttcctaccatggttaatgctagaaaagaaattgaagttcaagttgaattatatgaaggctgggacaataaagaacgtatgcaagaatggcttaacaatggtattgatcaagttgtttaccaccaaagtagggatgcaaaatttgcaggccaaaaatggggcgaaaaagatgttgcaaacgttaaggccttgattgacatgggctttaaggtttcagtaaccggcggagttcatccggaagttttgaaattatttaaagacttaccagtgtattgttttattgccggccgtgatatcagaaatgcggaagatccacatgcgcgtgctaagcagtataaagatgaaattaagcgcatttggggttaatcattaattttactcatattaaaaaattccttaattagttttagaaagggcaatgcacgtaaaaacgtttattatgcattgctctttttgtattaaaaggcaggtataggttatgactgtaaactcattaggtatttacgaaaaagcattaccacaagatttatcttggaaagaaaaatttaatttagttaaaaaattaggcttcaattttttagaattttctgtagatgaaagtgatgcacgcttagcacgtttggattggaccaaggaacaaagaaaagaatttagagatttaatgtgggacactgacattcgaattaataatttgatgttatctggccacagaagatttcctcttggatctaaagatccagaaaccagaaagaaatctcttgaaatgtgccaaaaggcagtagatctctgtgtagatttaggaattcataatattcaaatggcaggctatgatgtttattatgaagaaaagagtgagaactctagagaattatacgttgaaaacttagctaaatgtgttcatatggctgcaaagaaaaacattatgctttcgattgaaacaatggatgatccatttattactaacattgcagatattaaacaatataaaaagcaagttagaagcccatggcttcaagcctatccggatttgggtaacctctctgcttggccacaaaatgatcctgctaaggatttagagaatggaattggtaatattgttgccatccacttaaaagatactctggcagtaacagatggttttgagggtaagtttagagatgttccatttggtgaaggctgcgttgattttgaaggactacttcgtgaattagtaagactagactataacggaagttttacgattgaaatgtggccaggtgataacggtgatgatgatcctgttgctgaagttaaagaggccaaagctttctttgacaagatctttaaaaaagttggaattgaacaagaacctgtagattagaaagtggaaaataaaatgttagaagatttgaaaaaagaagtctatgaagccaatatgcaattacctaagttaaatttagttacttttacttggggaaatgtttcagggattgatcgtgaaaaaggtctgttcgtcattaagccatcaggtgttccatatgaagaattaactcctgaggatatggtagttgttaacctaaaaggtgaagtggttgaaggtactagaaatccatcttcagatactcctacacatacctatctatataatcattttcaaaagattggtggtatcgttcatacacactcaccttgggctgtttcatttgctgcagctaagatggatattccagctttgaacaccacacatgcagatactttctatactgatgtgccagcagctgatgcattaactaaagaacaaattgaggaagattacgaaggtaatactggtgtcactattgtcaaaacctttaaagagcgtggtctcgattatgaagcaacaccaggtgctttagtttcacaacatggcccatttacttggggtgaaacaccagctaaggctgtttataatgctaaagtcttagaagttgtggcggaagaagactatcatactttgcaattaacacgtgctaattgccatttaccacaatacctacttgataaacactattatcgtaagcatggtaaaaatgcttactatggtcaaaataatgctcattcaaaagatcatgcaaagcgtgcctaaaactaaggggtaaaaaatgcttgaaaattatttttttgattttgataaaactctggctagttcaggtaaggcgtcattgattgcgacaaagcaggcatttaagttaaataatttagatgagccagatgatgatcaaattttagattttatgggtattcctgctgatgtttcattccctaaaatggctaatagagaattgtcagaaagtgatgcgaaaaaattagttgatacctaccgtaatatttatggaaagtatgaaaaagaaaatacacatttatatcctggaatgcgagatgtactagaggatttacagcaaaaaggtaaaaatttatttgttgtatccagtaaaagtcatgatattttaaagagaaatttagataatttgaaaattactcaatattttaaagactttgtgggatgcgatgaggttcagcattataagccagccccagatggtattttgatacttttagacagatacaatttgaataataaacaaagtgtaatggtaggggatgctcgttatgatttgcaaatgggcaaatcagcgtctgttaaaacttgtggagcagcttgggatgcttttagtgtggatagcttaaagaatgaacatcctgattatttgctatttcatgtggcagaattaaaaaatattgaatagagttcatatattttaaaattggatggtatcaattttgaaagtagttgaactctttagcaaaaatgatattattaacttgtaagggaaaacggttacataacgatggtctataggaggacatcatggctgtagattacgattcaaaagaatatttaaagagcgtcgatgcttattggcgtgcagcaaattacttatcagttggtcaacttttcttaatgaaggccccacttcttaaaacacctttagttgctgaagatgttaagccaaagccaattggtcactggggaactattgctccgcaaaactttatttatgctcacttaaacagagtgttaaagaagtatgatctggatatgttctatattgaaggttcaggtcatggtggtcaagtaatggtttctaactcatatctggatggttcatacactgaacgctatccagagatcacccaagatgaaaagggtatggctaaattgtttaagcgcttcagtttcccaggtggtgtggcatcacatgctgctcctgaaactcctggatcaattcatgaaggtggggaattaggttactcactttcacacggtactggtgctatcttagataatcctgacgtcattgctgctgttgaaattggtgatggtgaatcagaaactggtccacttgcagctagttggtttagtaacaagtttattaatccaattaaagatggtgcggtattaccaattttgcaaatcaatgggtttaagatttctaatccaactattgtttctcgtatgagtgacaaagaattaactgaatacttccgcggcatgggctgggatcctcattttgtttcagtctttaaaggcggtcgttttgacggtgaaaaggatccaatgcaggttcacgaagaaatggctaagactatggatgaagtcattgaagaaattaaggctattcaaaagcatgcccgtgaaaacaatgacgctactttgccacattggccaatgattatctttcaatgccctaagggctggactggtccaaagaaggatttggatggcaacccaattgaaaactcattccgggctcaccaaattccaattccagttgcacaagatgatatggaacataaggaaatgcttgaaaaatggcttaagagctacaagccagaagaattattcaatgaagatggttcacctaagaagatcgttactgaaaatacggctaagggtgaccacagaatggccatgaatccagttactaatggtggtaagaaccctaagcgtttgaacttgccagattaccgcaagtacgcattgaagtttaagccaggtcaaatggaagcacaagatatggttgaatgggctaaataccttagcgaagttgctgatcttaacccagacacattccgtggctttggtccggatgaatctaagtcaaaccgtttgtttgcacttcttgatgatcaaaagcgtcaatgggaaccagaaattcatgaacctaatgatgaaaacctagctccaagtggtcgtgtaattgattcacaattgtcagaacaccaagatgaaggattccttgaaggctatgttttgactggccgtcatggcttcttcgctacttacgaagcctttggccgtgtagttgattcaatgcttacccaacacatgaagtggttaagaaaagctaaggaacaatactggcgtcatgactatccatcacttaactttgtcgcaacctcaactgtcttccaacaagaccacaatggttacactcaccaagacccaggcatcttgactcacttatatgaaaagaatcgtccagaccttgttcatgagtacttgccatcagacactaatacgcttttggcagttggcgacaaggctttgaaagacagagaatgcatcaatgttttggtaacttctaagcagcctcgtccacaatggttctcaattgaagaagctactaaattagctgataaaggattgagttacattgactgggcttcaactgatcaaggctataagccagatattgtatttgcttcaactgaaactgaaccaactttggaaagtttagctgcaattgatatcttgcacaagcgtttcccagaccttaagattcgttacataaatgtagtagatgtgatgaaattaatgagtcctaaggataataagaatgctatctctgataaagagtttgatcgcttattcccaagtgacattccagtaatctttgcatggcatggatacaagactatgatggaatcaatctggtttgcaagaaaccatcataatatacatattcactgttacgaagaaaatggtgatattactaccccatttgacatgcgtgtcctgaaccaccttgatcgtttcgacttggctaaggatgctgttgaaagtattccatcattggcaggtaagaatccagacttcatcaatgaaatggatgacttgcttgctaaacaccaccaatacattcgtgataatggtaaagacattcctgaagtcactgagtggaagtggacaggtcttaagtaaaaaataaagtgtctgggaaaaaactaactcttagaccataataataggacgatcaaaattcttaagtgagttttaatcgtccttttttcttttaaaattaaataaaaacggtcttttggtcattttctgttccaatatttgcttatattcatcatcatgaaggctattccaacatcggtttcaactttctttttgcctcttagatgtgtttgccttcttcgctttgaagaacttcttttgctttttcttttaaatactgccagttagggttatagcgtacttgacgctggcgaccgctagctgtcttagctaattgttccagttctgacgtaagcttcaactgcctggcccttcagcttatcatgatacttttcgacagccttgcgccaaacaaaagtgtagcggttagcatcagcttcaattttagtgccatcaataaaaacagccccctcgttgatcagccaacagattggtaaagtagataaagctcttcttaaccagttcattggcatgactgctgtgtggtatactggtcgacctgttttagcagggtgtaaagcagaatagcttctggaatcgaatccacaatccagctgatagcattagccaagtgattgctgggaatggtaaaatccaaattgagtgttaaagctgtttgacctgtgatatgatttttgtacatattagtttccacctttttgttttaatgaaataagaggccacaaatgatcacattttttatggagaaatttaaaatgttaaattttagatcatatgaagacgcagatttcgaaaaattatgcaacatccacgatcaagcgcgaaagcaagaattaaaatttgccaatcttgaagctgcatttattccattcaaaatagcatcaaagaaagagcaattatttgaagactatcaagtttacgttgcaacaaaagaaaataaagttgttggttttgtcggatttaacgaagaagagcttggctggctctatgttgatcctaaagttcaaggacaaggtattggtagtaaactgattgattttacgcttgaaaattcgaccaggccattttatttagaagtgcttgagggcaatcctgcacaaaagctttatctcaaaaaaggtttcataacaattaaacatgaaagtggcaagatgccaggtaatgaatcatttagtgttgaagttgacctaatggaatataaataaaacatcccaatcaggtgtgttttttgttagacttataaaaaatgaagctagtcaataaagtattgtcttgtcattagaaagtactacatatgaagtatatttcatgaagtccgcttcatattttagggatgatgattatcaataataaaattaaggaataccgcaaaaaacatcaacttacacaacgcgagttagctgaaaaagttggtgttacagaacggacaataatttcattagaaaagggtcggtacaaaccatcgattgttttagcttataaattagtacaattttttgagacagatattgaaactttattttgcttaaatgagtatgtgaagaatgagcaagccaaaggaaggaatgcttacaattctttttgcgattctatcagtcatacagctcttagaattaatttatgatgttgcaaatagaaaaagcgtcaattatattcaagatgttatttggttaatattgggcatctgtttgacagtcggttatttctatagtactaaatatatcggtatagccaagattgaagaagatgatgaacgcgataaatttattcaaactaaaactaataatcaagcattcaatattttacagtgggtcctttttgttttaggtgcagtaacgataataattgatgttaatctcggccaaatgggattagattctcgtgcaatggttattatagttgtaggcgttgtattaatctttttatgggcattttcttggattttgcaattaatcttaatgataattaattatttttgcaattgagactacaaaaaataaagcgactggattagctccaatgtcattaagttaagacattgacaattaagggtgcttttttagagatcgaatcatttggattcgatctctttttttgtataaaataaaggcgaaaagacctgccttttcgcttatcttatatattttaaaccttcaaaattattgccagaaagctggtgttaattatgaaagcccttcataagaatattctaaaacgtcttgatcaaattatcaataatactggggatcatattcacgattttattaataatcctcatgcttttaccaggaaacgcactttagatgcagcgacagtccttaaaactacaattaacatgcaaggtcagaatttaaacagtgaactctttagagcttttggcgaagatgcaactaaaaagaacgataaagtagttagtacttctgcctatgttcaacgcaaaagccagctttctcctgcttgttttaaacatattctgactgtttttaatcaagatctatttaatattcaactttttgatcatcactaccgtttgtttgccattgatggctctgactttaatcaaatctggaatccgaaatcgaataacattgtacaagcttcttctcataaaaagaaaccctattgtcaaattcacgttaatgccttatatgatctattgaataatacctaccaggattgtatttttcagcctaaatcagaaatggatgaacgcaaagcggctgttcaaatgcttaaagctttgaattgtggtccatatattgtaacaatggatcgtggctacactagtttcaatatgattgaaaactgcaatcgcctgcctaactgtcattacataatacgaactaaggctggacaaggcggagttaaagaaataacgacattgcctgatcaagaatgtgatcgtgagatttcctgcctggtaactacttctaactattactacatcacgcataaagccagtgagaatattcaccatgtccagcatcattatcgccaatatattaagtatcgctctaaaaatacccaggatctaagctgggattttggcgagttatgcacaataaaatttcgagcctgcaaatttagaattaacgatgccaaatcaggcaaagaagaatgggaagttgtgctaaccaatcttgatcgaaaaaattatccgctaaaaagaattaaagagctttatcatctgcgttggggtattgagacctccttcaagaaattgaagtattctttaggcagcgtacagttccattccaaacaagataaatttattgaaatggaaatttatgcccatatgattatgtttaatgcaatcagtcaaattgatgcacaggcctatattccgcaaaagcattgcaagtatcaatatgccatcaatttcaagcaatcatgcttgattattcagagcatgtatttggcttcttctttaacgcaagattttgaacggatccttattcagatcagctattataccattccaattagaccaggccgcaaggacaagagaaatattaagcccaaatcagctgtatattatttatatcgcgtagcttaaaaaagcagaatctgtgctatgcattatttgttgtacgaaaaaagcaccaatttaaccaattaaatgttaaatcagtgctttaaaagtctaatattaattgtcaatgtcttaacttaatgacattggattagctctggtcgcttatttaaattttagtatggcatttctttaaaaaattagaatatcgatctttttcaccgtttaccttccaatattaaccattcaccgaaatttttaaatttaaaatattttttcgtctatactgataagcaagaaaggagaaaaagggatgaaggtaaaatttaacattgataatcaattagcgggagaaagtgctgaattttggttaaaaaagatgactaataaattcagtcaattgggtaaagaattaagtggtgaacaagacacgatttggtgcagttatgatgatgaaattattcctgtgaagtttgaaaatatttatttaattcaagtcgaacaagagcaaactttaatttatgacaaaacacagagttacaggtataaagggcaattatatcaggttaaaaatattttgccacataattttttaatagcgtcaagaagtgcaattattaattatcaaaaaattgatcatttggaagttatggatggtggcaatattgatgtcattatgaagaaccaaatgcgggtacaaatttctagaagaaaaattaaagacttgaaagagaggttagggttatgaaaagaatggaatctttcttggtaagtggaataagtggcatgggaattggattaacttggtattcaatagtaactttatttcaaacgggaacgaattggaaaaatgctcaaattccgtttacaagtttgctcttttatttgattgtctcttttgtgatgggagcatttttcaatttgacaggattgatttttgaacaaacgcaatggtcactacgaaaacaaattattgtaaacttttttgttagctatgttgccttttttgcttttgaattagtgattaatgatttggctttatcggttcatttcttcttagtaattactggagtatttgtcttgatgtacttgctcgcttatggtttgtactttttacaattattgcgagatgttaaacaaatcaatcaaaaattgaaagaaaagtaaataatcaaaaacgatcaagcctaaaaatcttgatcgttttttcgttggttagataaaaattataaactgtcttgaatattatcagctaagtagtcataaagcataccatgctttaattgcttagtatcaactcccaaagcttcagcaattgcataggcaaaggcccaagcggtagcaggaccacggcttgttaaaattttatgctctttatcagtaacggcgattttctctgaaaaatgagcacttggggcatcttttaagcattcttcttcaatgcctggataacaagtgaagtccgcatctgccaaaacaccatagcgagcaagagcacgtggagcagcacacattgcggcatcccacttgccagcttcatgacgcttaattatcagatcacgtaatttttcattatcgcgtaagttagcagaaccagtcatgcctcctggaaaagcaaccaaatcataatctaataaactgtcatctacaactttgtcacaagtgatttcaatatgatggtcaccatctacttttttacttattaaacctaccatatcgcattcaacattaagtctacgcaatacgtcaacaacgcttaaaccttcgacttcttcgcaaccgtctgcaaatactacagcaacttttgtcataaaatcatcctttctataactattttaattatctacttacattagatctaagtaaaatgaaagatctgctaatttgcttaaatgaagagtaggatgaggtgaaattggtatcttgtcttttttaggtgccagccataatgattttagattggcattttctgcaccttgaatttcttcatccagattagttccaattactaaaactgtgtctggatcaatatctggattgtctttcagaatcttaaagaaaatatttttgcttggtagcttgtccgtaaaatcatcggcgaaataagcattgtcaaatgaagaaagcaattctgtaggtgcaaggcgcggttcgatttgagtgcgcttttctttagcaagcaaaatcaaatgcagcttgccactgacttcatcaataaagtcgatggcgcccttgactaacctggtttgatccttcattgcatcatcaaaaacagttcgcgttttagaaagatcttcttttaaaaatgtagataaagctaaatcgatttgatcatcgctagataaatttttaaattctttttctaagctagtgtagcgtagacgctcagctggtccccagtctaacccataatgttttaaagtttgccgcagcgcagttttttctgctaatttttcatttaataaactgccttctggaatgaaaattaaggtttcaaatgtagccatgaataaacttcctttgtgttagttcctattagaattataatgaactagacaattttaggaaaggaattaaaaaatgacaatctggaccgtaattttcttattattaggtggtgttgcaggtggcttattatcgtcagtggcctcaatggcatcacttgcatcatacccagttttgttagcagtaggaattccaccagtatttgctaatgtaactaatgatgcggcgctaatttggactagcatcggttcaactgtatcttctactaaggagttaaaaggacattggaagcaagtttggttctataccatttttacagttgtgggatcaattttgggttgtattttgcttctatcttttcctccaaagatttttgaaaaagcagtaccgttctttattgctttctcaggcctaatgattattgtttctggtaaacaccatagtttaaatactaagacacagcctacttggcttaaaataatttattttctcgcacttttagtcatggggatgtatacaggttacttcggtgcagctggtggggttattgtactggtacttttaacttatattactaatgatcgatttattgttattaacgctattaaaaatgtgatttgtggttttgccaatttggtagccttaattatctttatgtttacttcgcatatttattggcttcaagcgattcctttggcaatcgggatgttcattggtggctatattgggccagcaattttaagacgagtaccggaaaagccagttcgaattttcattgcaagtttggccttcattcaagccggttacttcttttatacggcatacctgcaataagtttggtacaatattaagcaatgaaaagggggctaaggttgatggcaacagaagtttatttggtacgtcatggtgaaacaatgtttaaccaattgaacaaagttcagggttggtgcgattctcctctaaccgtgaaggggattaacgatctaaagagaaccgctaaggccttgagtcaagttcactttgataacatgtattcatcagatttgaagagagcaattgataccgttcacttgatgaaggatgctaatgtggtctcggatattggtaaaattaaaaagctgcctgaatttcgtgaggtcttctttggaacttttgaaggcgatgatattaaccagacttgggaacaagtagcactagccgcaggaattggccatgaagatgatgtaactaagatcatcaatcaggtaggcttgcgcaaatttcgtgcagcgacaaaaaaggctgatccgcgtcatttagcggaaaatcaggatgagttagatgagcggatggtacgggcaattgacgttttgcgcgatttaactaaagatgaacaaagagttttgttagttagccatggtgactttattaaaactttgaccataaaatattggaataagagtaatggcaaaaacgatattgtttttccaaataatgggagcgttactcgtggaattttgcacgatgacggttcatttgaaatcgttgattataatgtagatgctgaagagctataaaagtcctactgccgaagtagggccttttttggtacactgataacgaaaggaaaatattttatgaataaagatcatacaactaagcgttatgtcttcgtaactctactgaatgttgttattactattgctgaatttataggtggtattttttcaggttcattagcactgctttcagatgcagttcataatctgagtgatgttggtgcaattattttatcttttgtggcgcacctgattagtcgcaaaagtcgtaatcagtttaagacctttggttatgaaagagctgaaactttagccgcttttactaatggcgttatcttgatcgtgatcagtgtggttttgtttgttgaagcaattcaacgtttctggaagccggaacatattcacggtggcattatgctgattgtctcgattattgggctggctgccaatattatttcaatgctagcaatgcatagcgattccaaggctaatttgaatgtacggtcaacttttattcatatgttaagtgatgccttgtccagtgtagcggttgtaattggtgcgatcttcatttacttctggaatgtaacttggcttgacccggttttgactattttagtttcaatctttgttttgcatgaagcttatgaaattacaatgaaagcagccaatgttttgatggaatctaatcctgatatcgacttgaatgaagtgaacaagattgttttatcgttccccatagttcaaaatatccatcatgtccatgtttggcgctacagcgatgactttattatgatggacgcgcatattaatgtagccccaggattaagagccgatgaattagagcagctataccaagatattggacaggagttacaaaaagagttaggtattaatcatattaccttacaagcagagtgcgagcgtggcagaaaagacaagatgatcgttccaggccacggtattaacgaagattaggtgaaagaatgtttaatgttaatatttttacagcgattattgtattgattatgggtatttatgacatgtcctatgcttttaataggcgtaagcaacctaccaataaaggcggcattagagcctttatggctttaggaattatcttcacgatcgcaggaattgttatgatcgttagagtattaatgaagtaaggaatcttagaatggctaaattagtattagttcgacatggcgaaagtgtggcaaatgctgccaatgtttatactggctggaacgatgttccgttgactaaaaaaggtgaagaacaagcagaaaaagctggtgaattgattaaaaccatttcggattttgctcccacccacattcatacttcagtcttatcccgtgcaattgtgacagcaaatatagtagccgatgtctgcaatttattatggctaccgatgactaagacctggcggctgaatgaacgccactacggcgctttaaggggccttaataaggacatttcacgtaaagtatttggtgtggaacaagttctattgtggcgacgtagttttgattcagttccacctaagcaggggtcgccaatgattgatcgccgttataagcattttgatcagcatttgatgccacgggcagaaagtttacatcaaactcagaaaagactcatgccatattattatgatcatatcgcatctcgattgatgaatggtgaagaccaactgatcgtagcccacggttcaagtttgcgtgctttgataaaaaagctagagcagattaatgatcatgacatcgtaaaactggaagttcctaatgcggaaccgattgtttatactatggatgatcacttaaagattattaacaaacaaattttacgtaaataatgttaaaaatgcaccttagtgcatttttttaatgctctaaatgaggttttacacatatctatggtaaaatctattatgatttctagtatatttagtttggagtattaggcatgcgtaaattatttttattacgaggtgcacctggctccggtaaatcttcttttattactcgccatcacttaaatccttatgcgatcagtcgtgatcaaattaggctactattggcggatttgacagtttactatcaagaggatgcggatgttttacaccaagtcattccgcggcacgtaactgtgcgtactgagcaaatggtggatcaccttgtagaacacaagatggaatatggggaaactgttattgtggatgggacgcatatcgttccaagtgcgattgaacattttaagccttgggtagacaagtatcactatgaatgctttgtagtagatctgatgcaacatactaccttagagagtttgcttaagcgtaatcagactagaatgcattacgattgggttaagcctgaagtggttaagcaaatgtatcgttcttatgaagcacatccagaagtaccatactgggcacataaagttgtgccaaatcagatggatcatgcgttgtcacagcgtgagacaaatttagatcgttatgctcatgtgattgcggttcctgacatggtagatgaagaagattttccacatgtgcatatctcgaacttttatttttcatttaatgacaagtttacagaaaagtatggaacttatcgaaatgtagtttcaattgctaaaactgaagatgaagcagttaagcagttcaagttgccatattttgtctttaagtttcatcacaagcactttttgatttcagcttatccaattcgaaatgagatgttggatccgatcagaaaggttaagggagtttggacatattcaactggtttgtataatgtagcggattttgtgaaagaatttccggaaaataaaaagcaacatgtgcatcagttcaacttaagtaagttagatccaacccgcttattacatatttggtaaaaaagacgtagttagaacattttatctaactacgtcttttgtgtaatttacttatattttgttttacttcaatttgccggccttagctaaaacttctttagccttttcaagtgaatggtgttcttcacgataacgcttgatgtcatagccatcaacatcggttaacttgctaagtctatcatcaaggtctttgaattctttttcaagatccttaatgacgccttcttcatcttcaacgtaaacatactcattttcatcagctttggcatcaatcttagcatcgtattcgccgacttttctagcatgtttcaaaatagatttaatatccttaatcgtttcatgttgtgcagtacggtgacgacgatcaggtactgaatcttcaattctagcaaggtgactttcagcatcctcaatcttcttagaaattctatttaaggcttttaattgtctttttgaataatctgtcaagttttatacctcctagataaaatgataagctctactaaatgcgctttcattgtaattagtaacgaaggtataagcaagaattaacacttatgaataaaaagagttacgccttaaaaacgtaactcttagaagttttggattaatatttaaaagctaaggcacccattggatcccatggcaataattgaattgggttatctttgccttcatcgtaagccttcttaagatcttctggtaagaatttcttgttaataactgcttggtaaacaaatgaatcaaaccaagaatcactcattacgaagtaacccttaaagccagttttttcaccccatgagttttcgatcttccatttagttggcttaccgtcaacgatatcaacaccggtaatcaccatggcatggtccatcatgctttcaccagaatcaagcatgtcggctttagacatagtgaagtcagcatcaaataattgatcacggcggtaaaggttagtatcaagaagtccagcacggcgttcagaatccttaactacgtttgaaccgaaccaaacaacttcgccactcttcaattgtttaatgattaagtccttcatttcatcaactttaaggtttaagtggcgaacttggcgaccgccttcaacgttacctaagtattcaactgagaataccttgtggaaaggtttgtcgttagttggagcattgatagttgagatatggtttgctaaatccatgccaacgtacttgtcaaagaattcctttggggtaatgtccctgtcaatatggtaattcttgtcatcatcgcggtattcgaagttgaacttctttggtggaacacccaatgaagtagccaaaatacggaagacatcgtttagcatttcttccttgcgagcttgtacttcatcttctgacttgccatcttgaactaatttacgtaactcaagaccatctttacgaagcaaagtatttaaagtgtcgtttaatgcacttgaattagtagcattagcagtttctggataaacactcttaggaacgataccatatttttcaataataccgcaaagcatgtcccattgaccgccgtcttgttgaggagtcgcaaataagaatgaaactttacgatcgcccaagtccttatcagcagttgcgatcacattttcaaagaaccagttagacttttcaaatttatcccagaagttagtgtaattttgagataattcgaagtcctttaacttaaatttcttttgtaatgggtgacgcatagtgtttaaagcactgaacatccagcagcgaccagactgcttttgatcggcagggttacctgtatcaatttcgattgagaaggttggatctaggtcgatcttagtttgtaagttttgactagctttgtagataccgttttcttgagcagcgtgactagccacatcaaaaacagggtggttagctaagtcttgttcaaatttattaatagtatcattgttgatttcttttaccataaaaaaatcctcctttataagtacttaaattaattttatcttattcaaaatgagtcgtctaataatcttatcgattaaatggacgatgataccaaattttgtgaaattgaggatgctgggtgaagtagtcaatgatcataggatcaagcggcaaaatgggtaagttagtttcttgagctaattgccaaactttttgcatttgtttttcaagcaaatcctgactattaaattgtggattaataaaaaaatggttcattatccagacattactgtctttgcgagcgattttatctaaggtaacgctagataatagtatgtcttcttcattttttatagtgaaaatttggtgcgtatcttgcttattcataaaaaattccttttttaaaaaataatctcatttttttgcgtaataaataatagagagctatttattttgtgttgactaaaaacattgtaaaatagataactgtcaaaataaaagataaatggagctttggaatgaaaacacgtggatttgaagtagtcaaaaagtatcaagatcaggaaattaatcttcctcgcagacagaccctagccagtgcaggctatgacatcgaagcggctgaagacattactatccctagcatttggcgactaaattttgtgcgaatttttaggttgattagaaatggacaccagctgtatgagcgcgactatgagatggcggatcagattttaaagccgttgttagtgccaactggacttaaagcttatatgccagaagatgaagtgttgattttagctaatcgttcatctaatacttttaagcgtaatctagctttgccaaatgggatcggcgttatcgatgcagattattacaataatcctaacaatgagggcgaaatttttgtacaaatgattaattatggcgtacggcctttgcacatcaagaagggagaccgtattgctcaaggcatttttatcaaatacttgaagaccgacgatgatgatccaattagtcgaaaaagagttagcggctttggatcaactaatgaaaagaagggtgattaatggctagagtaaaaacacaatataagtgtcgttcttgcggctatatttcggcaagttatttaggccgctgtcctaactgtggtgcctggaatcaatttgaaaaagaaactgaagaagtgcaaaagcgttctactaaggcaactgctagtcgtttgattcagaagactggattaaatgaaccggtaaagctggataagattaaagctgaaaaagaagaacgaattgtcactaaatctgaggaattaaaccgcgttttaggtggtggtattgtaccaggctcactagttttaattggtggagatcccggaattggtaagtcaaccttgatgttacaaattatgagtgacttatctgaaaaatataaggtgctttacgtttcgggagaagaatcagctaaccaaatcaaattgcgggctgaccgactgggtgtaggtcaaagtaatatgctcttatatccagagactgacatgcatgatattcgcgaacaaatcaatgatgttaagcctgactttgttgtaatcgactccattcaaactatgaatgaaccaagtcttgattcgatgactggctctgcctcacaggttcgtgaagtaacaagtgaattaatgaaaattgccaagatggatgccattacagtttttgttatcggccacgttacaaaagagggtgcgattgctgggcctaagatcttggaacatatggtggataccgttctctattttgaaggggatgaacaccattcttaccgaattttgcattctgttaaaaaccgttttggagcagcaaacgaaattggaatgtttgaaatggttaatgaaggcttaagagaggtaactaatccatcatcaatttttctggaccaaagattacctaattctactggctctgctgtggtggtatcgcttgaaggaactaggccacttttagcagaaattcaggctttggttactccgacagcttttggctatgctaaaaggaccacgtcaggtattagttttaacaaagcttcattgctgctagcggtgcttgaaaagcggggaaacttaatgttgcagaatcaagatgtctatttgactgcaactggtgggattaaattgaatgaaccagcaattgatttagcaattgccatggcagttgcatccagttataccgataaagaaatttcgccgacagattgttttgtaggcgaagtgggcttaactggtgaagttcgccgagttgataaaatcgatgcacgagtaaaagaagcggctaaagtagggtttaagcggatctttattccacggcataatatgtattctggattaaaagatcatggcattgaagtaattcccgtttcgagtattccccaagctttaaaattagtttttggctagcattaattgaattcttactatataacgagtaaactaagattgtttgaatttactattttttgaaagaggcatgaattttggctaaagaaaaaatccgtgtaagatatgcaccaagtccaactggtcacttgcacattggtaacgcacgtactgcactttttaactatttattcgctcgtcataacaagggtacgatggtcttgagaattgaagacaccgaccaaaagcgtaatgttaagggcggttctaagtctcaaatggaaaaccttcactggttaggaattgactgggatgaaggtcctgataagggtggcgactatggtccttatcgtcaatcagaaagaaaagaaatttaccaaaagtatattgatcaattgatcgatgaaggtaaagcatattactcatacaagactgaggaagaacttgaagcacaacgtgaagaacaacgtgctgcaggtgttgcacctcactatacttacgaatatgagggtatgactgctgatgaaattaagcaagctcaagatgaagcaaaggctaagggcttaaagccagttgttcgtatccacattccagaaatggaaacttattcatgggatgatattgttaagggacaccttgagtttgaatcagacactattggtggggatttcgttattcaaaagcgtgacggaatgccaacttacaactttgccgtagttatcgatgaccacttgatgaagatcactcacgtacttcgtggtgatgatcacgtttctaacacacctaagcaattagttgtttatgaggcacttggttgggaacctcctaagtttggtcatatgacattgatcattaattcagaaactggtaaaaaactttctaagcgtgacgaatcagttcttcaatttattgaacaatatcgtgatcttggttacttaccagaagctatgtttaacttcattactcttcttggttggtcaccaaagggtgaaaacgaaatctttaacaagcgtgaattcatcaagcaatttgaccctgcacgtttgtctaagtcacctgctgcttttgaccaaaagaaacttgaatggattaacaaccaatacatcaagaaggctgatcgcgacactttgcttgatttagctttgaacaacttgcaagaagcaagtcttgttgatgagcatccaacaccagaaaagatggaatgggttcgtcaattggttaacatctactcagtacaaatgtcatacactaagcaaattgtagacatggctaagattttctttgaagaagctaaggatctttcagacgaagaaatcgaagaaatcaagaatgatgatggccgtggtgtaattgaagaattcaagaagcaattagacctcatcccaagatttacttcagttcaaatcatgaacgctattcaagcaactcgtaaggctactggcatcaagggaagaaagctctttatgccaattagaattgctaccacgcgttcaatggttggacctggtattggcgaagcaatggagcttttaggtaaagaacgtgtattagaacacattgatttaaccttgaagcaaatgagtgctaataatctttaattagataaattgaaaaagaggctgcaaataaatgcagcttcttttttcatctgctaaaataaaaattagttattttgacagaagggacaagtgttagccgtgagagtttataatacactgacgcgtaaaaaagaagaatttaagccattagttccaggacatatcagcatgtatgtctgtggaccaacggtgtataactatattcacattggtaatgccagaagcgcaattgcttttgacaccattagacgctattttgaatataagggttatgacgttaagtatgtttctaactttactgatgttgatgacaagatgatcaacgaagcgagagctgaaaaaacgactgtacccaaattggctgaaaattttatcaatgcttttttggctgatacgacagcgctaaacattgagccggcgactttgcatccccgtgcaactcatgaaattaatgacattatcacttttgttaaaagcctaattgacaatggctatgcttatgaagtagacggcgatgtttattatcgtgccaaaaagtttaagcattacggtcagttaagtgatcaaaatattgaacagcttgaagagggtgcttcagagcacattaacgatacagaacaaagccgcaaagaagatccaatcgattttgctttgtggaaggcgcaaaaggaacccgatgaaattgcttgggattcaccatggggcaagggacggccaggctggcatattgaatgttctgtcatgagtaccaaatatttaggcgatacgatcgatattcatggtggtggtcaagaccttgaatttccgcaccatgagaatgaaattgcacaaagtgaagctaagaccgggaaaaagtttgttaattattggctgcataacggttttgtaactgtcggtaaagatcaggaaaagatgtctaaatcactgcacaatttcgtaacagtgcacgatattttaagggaagttgatccgcaagtactgcgcttcttcatggctagcgtacaatatcgccgccaaattaactattctgctgaaaatttagcacaagcagctacaattttagatcgctttaaaaatactttgactaatattaattaccgtctagaagatgatacagctagtgaagaatcagccgaattagcacaggcgattatggcaactaacgaaaaatttgaacaggcgatggacgatgactttaatgtccaaaatgctttaacagctatctatgatttgttgcctgtagttaatgccaacgctaatgctgctagagctgacaagcaagaattgcaaaagtttaaagagaaattagctagttggttattagtgtttggcgtggatactaataagctttgcgttaaaaatgctggctccaatgacgatgaaattgacgctttagttaaaaagcgtgatgaggctcgagcaaataaagattgggcaactagtgatcaaattcgtgatcaattaaaggaaatggggatcactattcaagataccccacaaggaactaggtggactcgtgactaaaataaaaaaactaacggaagaggatgttaatccggatactttaaatggacaaactttagcctatttaggggatgcagtgtatgaattaattattcgcagacacctagttaaaggcggtatcgttaaaccacaagtattgcagcgtgaagcgactcactatgtttcagctaaagcacaagctgcgttggtaactaagatgcaagatgaagaaatgttaacggatgatgaattagctgcttttcgtcgtggacgtaatgctaaaagtcatactaaggctaagaatactagtttgaaaacataccaattatcaacaggctttgaagcaatgattggttatcttgatttactggggaaaaatgatcgagtggcagacttaagcaagtggtgtattgatactgtagaagaggacgggctgaaaaattatgacttcaaataaagattttgtctttggacgccatgctggacttgattatttaaaaacacaaagtgccgacaagattaataaggtttttttacaacacggtgtacaagaagaatttgctaatcaagtttatagtttagctaaaaaaaagcgtttagttgttcaagacgtgcctaaaaataagcttgatcgtttggttgctggtggcaatcatcaaggtctagttttagcaatttctagctttgaatatgcagatttaaatcaattgctggacaagtatgatgcggaaggtaaagaaccatttttattaatgttggattctattgaagaccctcacaatctgggatcaattttgcgttcagccgatgctactggcgttgacgggatcattattcctaagcgtcacgcgactggcttaacttcggtagtagctaaaacatctacaggagcaattgattatgtgccagtagcgcgcgttaataatttagttcaaactactaaagaactgaagaaacgcggttactgggtctttggaactgatatggcaggtactgattatcgtgaatggaatgcccaaggcaagactgtactcgtaattggtaacgaaggtaaaggcatcgccccattacttaaaaagcagatggatcaaactattactttgccaatggttggtcacgtacaatccttaaatgctagtgtggcaaccggggtattgctttatcaagcttataacagtagaaatccattagtaaaataaacagaaagtagacaaaagtgtgagttttgtctacttttttagatacataaagctcatttctgtccattaaacatgtgttttcttctcaaactcaggggatagtctgtattctttgaggtggaggataaattgaatgattaatgaagagaagctgattaagaaagtacgggcaggagatgaccaagctttagaaaaattgtttcatttatatgagccgttagtaaattcaatcgtgaagcaattctatttgcatcattatgatcgtaaagactgggatcaagaggcaatgattgtttgttatgaagcagcactagttttctcgcctaaaaaggggaaatttagcagtttatataaaactaaattgtttaatcatgcacggaccttggtacgttacaatatggcacgtcgcaggcaaatctatagtcaatcgattccgctagaaaaggcggacattcaaggaagcgtgaatgaaccatgccgctctgaattatcgattccagttgatgagacttacaataattttgttaatagcttgtcacacgttgaattaattgcattattaaccataattggcgagataagtacagagtatgcgattgatcatctaaatattgaagcaatgaagctggtcagagctcgagcacgaactttacagaaaatgcggaaagtgcttttttgatagctgatcaaaagaaagtgcggtataataagtaatgtagaatattttaggaggtaatttaagatggcagacgaaattattaagactgcattgttagaccgtcacatgaaggaagcttttgactggagtgattcagatatgccagttagagatgccctttgggactactttatggaaaagaatggtagagataccatgaagacggaagaagatatgcttccatttttgaaagactcagacgataaaatcgaagccttcgttaacgaaaatcttaagaagtaaatccgactaaaaaacaatgttctacgcaccgtggtcacgcatagttttgaccactaagacagctaccttctccggtggctgtttttttatactaaaattaagaaagaattttaaagatgaaatatataattggcatagacataggaactactgcgactaaaggtgtgttgtatggcgaagatggaagtgaagtagctaaattggcaatttcctatccattgattcaggaagaagcgggacaggctgaagaagatccacagcttatttttgacgcggtacagaaaatgatttatcaattaagtcagaaagcatctggtcaaattttggcaatttcttggtctagtcagatgcacagcttaattggcttaggtgaaaataatgagttactgacaaacagcattacttgggcagataatcgtagtagtgatgtagtgcagcgggcaaaaaagtcgggctgggcaagaatgatttatcagcaaacggggatgccgccacatccgatggcgccagtgtataaattgctgtggcttaaagaagaacagccaacactttttgcacaagtaaaaaaatggattagtatcaaagaatatattatttggggcttaactggaaaaatattaactgatacaactatggctgctggcagtggaatgatgaatttaaaaacgctgacctgggatgaaaagatattggctcagattgggctagatcaagttcaattgccgacaattgctgatcaacaatctactgtgggtaaaattattccagaatatcgtgctaaattgggtttaaatgatgaaactcaaatcgttttgggcgcaagcgatgggtatttgtcaacgattggtgtcggcgttttggatgagaaagattttgcattgaatgttggcacttctggtgcggttagagtaattgcaccgaaggcaattgttgatcaaaagaatcgctttttctgttaccctgttgacgccaaacattatttgcttggcggccctgtaaataatggtggaattgtgttcgattgggccagaaaaacaatttttggcccagatgaaacggcagaggacgtcttaaatgtggcacaaactgctccggctggaagtaatggattgttgtttcatccttatcttggtggtgaacgagctccaatttggaatgctcaagcacgtggatcttttgttggcttgacgcgaaatcacactaaaccgcagatggctagaagtgttttggagggaattgtttttaacttgcttggcgcctctcaaggattgcttgatcaagtgggacagcctcaagctttacgtgttactggtggctttgtgcaaagtgattttgttagacaattaatcgcggacatttttaacttaccagtgattgtaattaaaaatgagcagtgtggtaccctagcagctatgtttttagctaaaactgcattagaagataagccagacctggaaaagattaaaaagcgtactgccgaaagccaagtttattttccaaatccccaaaatgtagcgatttatcaagaattgattctcgtttatcgaaaaattgagcatgaacttgaagcctcttatgaagatttggctcagtttcaagataagcatccacagaaatttgagtaaaacaaaaaagacgcattgcgtctttttttcatagattgattaactattaagcattttcaatatcttcaacaatctgatcaactgtcatacgattgtctttcaaaatttctttcaaaggtacttgatcagtatagacacgtttttggccgtagttgagtactttaatatccttgtcgccaaggtaggaagctactttttcaccaaaaccgccgtccaaaatattgtcttcaatagtaacaataactttgttttcttgagtcaatttgtctaaagcggcagtgtctaaaatattagcagaaactggatttactaagctagcacctgtcttttcagccacctttttacctagcatatcgtacatatcacctaacgctaaaacagcaacatctttacctggtttaatgtcgtacttgatttctgaatagtcaacagcagtaatttctttaccttcaggaacatctttggtaggcatcttaattgctacaggatgcttcttttgcttaatagcccattccatcattgccttttcttcggctaagttagttggagcaaggtagatccagttaggcaagttagaaatcattacttgatcaaacacacctaggtgagtcttacttgtgccagaaatgccaccaccagcaaccatcattacaactggtaaatcattagcggcaacatcgtgtgataattgatcaaatgcacgttgcaagaaggttgaattttcaaataaaactggagttgcaccttccttagccattccggcagcgaaggcaacggattcttgttcagcaattcctacatcatggtagttttcaggatatttgtttttaattctgtctaagccgaaaacgccgggaattgcggcattgatagccatgatcttctcaccattattgatgtgatcttcaagaacatcgagtgcaatagagctagcggtcggaccttcaggcattgctactgtcgtcttgtcagtctttaaatcgaatggcattacccagtggtgtgcttcttcgttgtcgattgcaggttgataacctttgcccttgagagtgttgatatgaagcaaaatagggtgatcaacatttttaactgctttaaaagcatcgatcattgattggatatcattaccatctgcgacataacggtaatcaaagcctattgcagtaaatggattttctttggtttcaccattagaatcacgtagtttctttaaagcagtaactaagccaccgacgttatcatcaattgacatttgattgtcgtttaccactacaactaagttatgcttttcaattgcagcgttgtttagcccttcataagcaaggccaccggtcattgaaccatcaccaattaaggccatgatgttttcatgtttgcccattaaatcgcgtgctttagccatcccagttgctaaggcaattgaggtagatgtgtgaccgacggcgtaatagtcatatgggctttcatcagggttgctatatggagttacatcttcatagtggtctggatcaagccaagcgagtgcacgtccagttaacattttgtgcgggtaagtttggtgggaaacatcccagacaatcttgtcctttggtgcatcaaaaacatagtgataagcaattgtagcttcaacgattcctaagtcgggacctaggtgaccaccttcagcggcatctttttctaagattagagtcctaatttcactggctaacttttccatttctggaagagataatttttttaaatcagcaggaccagaaattttattcaatagatattcaggatgtttatttattattatgtcctttctaacaagtagttacacttattatagataagcaaaaatcaaaataaaaatatttagttgtaattgagctcgattacttttagtaatgtaaatcagattattgacgtaggaagggacaacagtataaaatactgagtaagtatgtgtttttataaaagtttggaagtgagattatggcagtgaaaaaagcagccttagcctgcagtgtttgtgggtcacgcaactactcaatcaccgcaagtaagaatcgcactcagcgacttgaacttcaaaagttttgcaaacattgcggtaagaaaacattgcataaggaaacgaggtaaataaagctaatgattaagttttttaagagtgttggtcatgaaatgaaattggttaaatggccatccgcaaagcaaaatagacgtgatacagcaactgttattactagttcaattttatttgcggcatatttaggtgcacttgactggctcttcacttggttgactcaaagattaatgtaattgctagcataattagaaattatcagcgattcatgctataatattgacagctaaaagaaaacctctgtgggaggtttttttgtttacctaaaatttaaggagaaaaatatggtcgaaacaacacaaaagaaatggtacgttttgcatacttattcaggctatgaagacaaggttaagtcagacttgttgtcacgtgcacaaagcatggggatgcaagactacattttccgtgtaatggttccagaagaagaaaaagtagaaaccgttcgcggcaagaaacaagaaattgaagaaaagattttcccaggatatgttttagttgaaatggtaatgactgatgaaagttggttcatcgttagaaacacacctaatgtaactgggttcgttggctcacacggtggtggctctaagccatcaccacttcttgatgaagaagtaacgcgtttgcttaagaatcaaggtcaacctgctaagaaaccagtagttaactttgatattggcgaatcagtaactattactgaaggtgcatttaatggcatggtaggtaagattactgatattcaaccagataagtacaaattatacgtatcagttgacatgtttggtcgtgcgactactgctgaacttgattatgatcaagttaagaagcttgacgaaaacgaataatatttagaatttttagttgtaattgtacccaaacgatgttattctaatacggtacgtttattattgtgggaggagaaaaaaggaaaattctccattttaaccgcatcacggaatcaaggaggttttgaccgtggcaaagaaagttattaacgtagttaagttacaaatcccagctggcgctgctaccccagcacctccagttggtcctgcattgggtcaagctggtattaacattgttggttttactaaggacttcaatgctagaaccgctgaccaaaagggcatgattatccctgtagttattactgtatatgaagatcgttcattcgaattcattactaagactccaccagcaccagttcttttaaagcaagctgctaagatccaaaaggcttctggtgaacctaataccaagaaggttggtaaggtaaccaaggaccaagttaaggaaattgccgagactaagatgaaagaccttaacgctgctgatattgaagctgctatgcgcatggttgaaggtaccgctagaagtatgggtatcgaagtcgaagactaatcctgttatttaggtaacaaattaggtgggagagttaagagaagctcgtttgaccacatatacaaggaggaaatcacatgccaaagcatggtaagaaatatttagatgctgccaagaaggtagactcaaataaattatactcagtagcagaagctatgaaacttgttaaggaaacttcatacgcaaactttgatgctactgttgatgtagcttacaacttaagcgtagatcctaagcaagctgaccaacaaattcgtggttctatcgttttaccaaatggtaccggtaagacccaaaccgttgtagtatttgctgaaggcccacaagctgatcaagctaaggctgcaggtgctgactttgttggctcagatgacttggtagaaaagatccaaggcggctggttagactttgacgttgtagtagctactccaatgatgatggctaaggtaggtcgtttaggtcgtattcttggacctaagggcttaatgcctaaccctaagactggtactgttaccatggatatcgaaaaggctgttaagaatgttaaggctggtcaagttgaataccgtgttgaccgccaagcagctattcacactcctattggtaaggtatcattcactgaagaccaattagttgaaaactttgacgcattacgcgacgttatcttacgtgctcgtccagcttcagctaagggtcaatacattaagagtgttgctgtttcagcaacctttggcccagggatcaagcttgatccattaaacttggactaatttaaaatagactattaaaagcctcgctattgcgaggcttttttctattcattgacctattattttcgaacatggtatcataaattgaacttacaaatctatatattaaggataatgtcatgaaaaagcattctattggaaaactagtcattatgttggtgctaatgctagcttttgttacgggctgtgctaataatggttctaaaatcactattgttggttcaagtgcaatgcagcttttagcagaacaagcaggtaatgattatcgcttaagtcatcaagacagcaacattgtcgtgcagggtggaggatcaggtacaggattgagccaggttcaagctggtgcagtccagattggaacctctgatgtttttgccgaaacacaaaagggaattgatgccaagaaacttcgtgattataaaattgcagtagttggtattgttccaattgttaataagggtgtaggtgtgaaaaatgtttcgcaaaagcaattgaaacagatcttcactggtaaattaacgaattggaagcaactaggtggcaaaaatgaagccataactgtgatcaatcgttctaagggaagtggtactagatctgctttcgaagatataattttacaaggaacaaaaccagttaagtcgcaagaacaggactctaacggtgccgttaaaaagattgttaattcaacgcctggtacgattagttacttgtcctttccttatgctcatgataccaatattcaaaagttgagtattaatggggtaaagccaactaacaaaaatattactactaataagtggaatatttggtgttatgagcacatgtacactaagggtaagcccaacaaacaaactaaagcgtttattaattatatgttaggtgaaaaagtacaaaaagatcttgtacctaagattgggtacctcagtatcaatgaaatgaaagtaactcgtaatagcaagaatcaagttacacaaataggaaaatagttcatggataagaaggataaattaaaggaagttgttgatcaagcaattgctagtcaacacgttccacacgttaaattaaaaaagatgggtccgactagtgttgatattgataaattaaccaagccatctaaagagactcatcaagaatattggggcaagggtttaacttacttggcaattgttttgattattgtcttagttgtctcaattatcggctttgtcggctatcacggcttggctacttttgtcagcgatcatgttaatgtcattcactttttgacttcaactgattgggacccgggtgagggcaagaatcatgttggtgctgcggtaatgatcgttacttcgttcttagtaactcttttagcagcattggtagccaccccgtttgcaattgcaatagctctttatatgactgaatattcatctaaaaagggtgccaatttcttacagtcagtgactgaattattagttggaattccgtctgtagtttatggtttcttgggattaactatcatcgtgcctgtgattagaaaactatttggtggaacaggttttggtattttagcagctacgttggtgttgttcgttatggttttaccaacaatcacatcattaacggttgatagcttaaaggctgtaccaagtcattttagaaaagcttcaatggccttaggttctacgcattggcagactatttatcatgttgttttgcgagttgctacgcctagaattttgacggcggtaatcttcggaatggcaagggccttcggtgaagctttagccgtacaaatggttatcggtaatgccgtcttgatgccatacaatttggtcagtccatcagcaacattaactagccaattaactagtcaaatgggaaatacggtcatgggaactttgccaaacaatgcattatggtcattagcattattgcttttaattatgtctttggtatttaatttcctagttaagttaattggaaagaagggacaaaagtaatatggatgcaaaaaagaaagataaattagctacggcgattatctatattttggtaggaattgttgtattaattttggccggtatcctaggtgatatcttgattacaggtattccacatttgtcctggcgctttttgagttctgaagcctcatcataccaagctggtggtggggtacgtgatcaacttttcaattcaatttatttgttaattttgactactattatctccttaccaattgctttaggagcagcaatttatctagcagaatatgctaaagataattgggtgaccaatttgattagaactacaattcaaattcttagttcattaccatcaattgtagttggcttattgggttatttattgtttgtagttcaatttggctttggtttttcaattatttctggtgctttagctttgaccttttttaatttgccaattttaactagcaatattgaagaagcaatcaagggcgtcccacaagatcaacgtgaagcaggattggctttaggattatctaattggaaaactattcgcgggattgttttacccgctgctcttcccggaattttaactggaattattttgagtgcgggccgaatcttcggggaagctgccgctttgatctatacagcgggacaaagtggatcaacagtcaattatgcggactggaatccatttagtccaactagtccacttaatgtaatgcggccagccgaaacattggcggtccacatttggaaagtaaatactgaaggaattattcctgatgccacgattgtttcagcagctacttcagcgctcttggttattgtggtaatcgtatttaatttaggtgcacgttatttaggcaataaattgtaccgcaagttaactgcagctaagtaggtgaaataatgcaagatttaaaacctagctatattaaaacttttgcaaatgatgatttggaattatcaactgaagatttaagtgttctttatggcggtaaggtacaaaaattatttgatgccagtcttcaatttaaaaagaacacgattacagctttgatcggtgcttcgggttcaggtaaatcaacatttttacgttcattaaatcgaatgaatgatcgagtagcaactgttaacggaaaaatctggtttcatggtttagatgtgaataagcctaatatcaatgtttatgaattaagaaaaaacattggcatggtttttcagcggcctaatccatttcctaaatcaattagagaaaatattgtttatgctttgaaggcagatggacataaggatcgggcagaacttgatcgagttgtagaagaaagtttgcgtgcggctgctttatgggatgaagttaaagataagctggataaaagtgcattagcattgtcgggtggtcaacaacagcgtttatgcattgctcgtgctttagctgttaagccagaaattttactactggacgaacctgccagcgctttggatcctgtttctacttctaaactggaagatacccttaagcagttgaggagtaagtatactatgattatggtaactcacaacatgcagcaagcctcaagaattagtgattatactgcattcttccatttaggacatgcaattgaatataattcaacggcagagatctttactaatcctaagggtaagattactgaaaactatattcagggaagttttggataaaatgacaacaataatttcagcaaaagatgtacatctaagttatggcaattatgaagcactgcacgggatcagtcttgattttaagaaaaaagaattaacagctttgatcggtccaagtggttgtggtaaatctacttttttacgctgtcttaatcgaatgaacgatgacatcgaaaacattaatatcacaggtgaaatcaagtttgaaggccaagatatctataattctaaaatggatttggtcagtctacgtaaagaagtcggcatggtttttcaacagccaaccccattcccgttttccgtatatgacaatgtggcttatggcttaaaaattgctggtgttaaagacaaagagctaattgatcagcgggtagaagagagtcttaagcaagctgctatttggaaagaaacaaaggacaatttaactagaaacgctcaagcattttcaggaggacagcagcaaagaatttgtattgctcgtgcgttggctgttagacctaaagttgttttattagatgagcccacaagtgcgcttgacccaatttcaagtagtgagattgaagagacactgatggaactaaagcatcagtatacttttattatggtgactcacaatttgcagcaagcaggacgaatttctgatcagaccgcctttttgatgaatggcgatttgattgaagctggtccaactgaagaaatgtttattgcacctaagaaacaaatcacaagtgattatcttaacggtcgttttggttaaaattttgaggtaaaaagatgcacgaaatatttttggatgaactgaaaaaattaaatacacaatttatggaaatgggtgtcctcgtcaacgatgatattgaccatgctacccgtgcttttgttgatcatgataaaaagactgcgcagtcaatggttgatgatgaagaaaagattcctacagaatcaattaatattcaaaagcaagccttaaaattaatggccttgcagcaaccggtagctactgattttagagttgttatcagtattttaaaggccactactgacttggagcgaattggtgaaaatgctatgagtattgctctggaaacaatcagagtaaaaggtaatcctcgtattccagaagttgaagaaattatttctaatatgacacataatgtgcgacatatgttaattcaagttttaactgcttacgtgcaagatgatgaaaaaatggcacgtgaagtggctagtcgtgatagcatgattgaccacgactatgtaagagctcgtcaattgatcgttgatggaattgaagatgatccttcgcgtgcaatggcttcatcaagctattttgtagttacccgtttacttgaacgaatcggtgaccacattgttaacttggctagctgggtggtttataaaactacgggtgaactagaagaactatctaattcaactgaaagtgaaacgatttaaataaagtaccgtaaaaagcggtgctttttttgtaataaaaaacagttgatacgcgtggtgctagttaaatcgttctagacaatatgccatattataagctaaaatagctatttctagccgctgttgaaagcctactggacttcttgctcgattattctcagcgttgtaataactaagcaaagaaaagtcgctttcaatgctttttctaattgccatcatcgcttactattgcgtggaccttgaagccataataatagactttcttggttgctttataaccaatatcagctacgccccgaaagatcttgacacgataattgcaaacaggctggcaaactggcactgggaaactatcaataatcaaaaattctccagctgtctttacttcttgattccaagcctgacggatacaacgaattagaggcaagagcattcgagctcgacggttaaaacgagaatgagataagccaacgaagaatttacagaatcttcgttgagattcaattccaatttcagtttgccaaatgagcatcgctaagatagaactatcaggaagcttggtctgatcaacatttttacgatgtttaagtccatcaggcgcataaagcttatatagcgagcgacaaatcacatttaaccgattaaaactaacttgtaaatggtgagaaaaacgcttaagcttgagatagttcaattagatcagactcttttctatttaaattacctacaacttttattaactaaaacgatttaactagcaccacgcgtataattaatgaatatttcaaaaactgtattggcgttataccaaacaattattggtgaaaaacagaaacgcttaatcaagacagtagatgcttatttggacattaactacggtgataaagtttatcagataattgatcaagttaaggaacgtaatattccaattttgtcttttggggatatagcagatcaaaacaatacttactcaaactacactgtttttggcaatgatcaagttgacgagatggtggataaaattaatgaaatcatcaataaccaaaataaataaaattatcttttgcattttacagcaaagcttgctataataattaactgtaaattctacctaagactcgggtggcatgacgcctcaaaatcccgccgaggccagaagatgatgaagatttttatgctccatgtctttcggcatggagtttttgcttttttaaggccttatagaatttatcaatgtgatcatggaggtgaaataatttgagtaaagctgctattgctgaaaaagaaaagttcgttgatgcatttgctgaagaacttaaagctgctaaggcaatcttggtaattaactaccttggtttgactgttgaagaagttactaacatgcgtaaggaacttcgtgataacgatgttaagatgaaggttatcaagaacacctacttaagacgtgctgctgctaaggctggtatcgaaggtcttgatgatacttttgttggaccaactgctgttatctacactgataacgctgatgacgttactgaacctgcacgtatcgtttctaagtacgaagatgactttgacgttatcgaaattaagggtggtatgcttgaaggtaagttgacttctaaggatgaaatcaaggaacttgctgctatcccaggccgcgaaggtttgctttcaatgcttgtttctgtattacaagctcctgtacgcgactttgcatatgctgttaaggctgttgctgaatctaaggatgaagactcagctgaataataaagaaatttatatttaatatctaaattctaatttttcggaggatacttaaatggctttagatactgataagattattgaagaattgaagggtgctaccatccttgaattgaacgaccttgtaaaggctattgaagacgaatttgacgttactgctgctgctccagttgctgctgcaggtgctgcagacgcaggtgctgctaagtcagaattcgacgttgaattgactgaagcaggtcaagaaaaggttaaggttattaaggcagttcgtgacattactggtcttggccttaaggactcaaaggaccttgttgatggtgctcctaagaacgttaaggaaggcgtttcagaagacgaagctaacgacatcaaggctaagcttgaagaagttggtgctactgtaacccttaaatagttacagcccaactgggcaactatgaataagctctttgctatgtgcgaagagcttatttttttgtataattaaatttatgatgaaagatatagaaagaagactaacgccatatcaatgggtaatggccattttagctattatttcgatttttttgattattttagattttgctgcggttattaatattgatgaaccgactagtaaatggttctggatcaatagtgcaattgtagtatattttgcaattgattattttcgtggcttacatgcagcagaagacaagaaactatatttcaaaactcacatttatgacttgctgagtattattccaatggggttattgtttatcagcttaaatatttttaatttatctgggctggtatcagatttgcggcatttgcgtttgattcgattagctggtttgatgggaaaattacgtaatatttttcatactaatggcctactctatgtaatcttttttacaattacatttttgttggtaggagcggaagcattcgcaatcactgaacatgtaacgctggatactgctttttggtgggtcatttcaacagcttctactgtcggttatgatgcaatttttggcaaaacaattccaccgcatagtattgtaggaaaattcgttacattagtaatgatgcttttaggaattggaatagttggtatgttaacgtcatcgattacttcgtatttgatgaggagaacgaatggcgcgaatacgttaaaaacgcatgataatattcaattaattttgaaaaagcttgataatttagaaaagcaaaacaaggatttggctgatcaaaacaaaaagatgcaagcacagattaatgaattgaaagatgtacagaatacaacggagctgcataagataaaagaatggtttgagaaaaagaaaggttagttaaaatgagtgaagaaaaaaatcaaatgtattttgcgactgatcctactgccaagcatgatcaacatgttgttgattatcatgtggataatattgatttgaaattcacaacagacgcaggtgtcttttctaaaatgagggttgattatggctcaggcgtattgatcaaggcaatgaaagatgttgtttttcctaaggataatatcttggatgttggtaccggttatggtccgattggtttatttgcggctaagttttggcctgatcaaactgtagatatggttgatgtaaatgagcgtggattaagcttggcaaagcagaatgcacaagttaatcacatagataatgtaaatatctattcctctgattgttatgaacatgtggataatgataaaaagtttggtctaatattaacaaatccgcctattagagcaggaaaaaaagtggttaatgagattttactgggagcaaatgagcatttggttaatggcggtatcttattagtagttattcagaaaaagcagggagaacctagtgcgcgtaagctgatgaccaatacatatggtaattgtgaaattttaacaagagataaaggctattatatcttaaaatcaactaagaaataactaaataaaaaatgcttgaaagtactattaaataagcattagactttataaaagtgctttcaaaactggatttatcctcgtataataatcttgtaaatatcaagagtatgtgaagaggataattattatgaaaaaggcttggaaatacattgttgcagtattgattgtaattgttggtgtgtttatgttaggtatgatttccggtgataacgagactgctgctccagctggaattgctgcattatacttgatcttgtcaggaatctttttctaccacaactttagaaatcgtaacattgaaccattgtaaaaagtaagcagctagtcgcaaatagctgcttttttgatacaataaataaaaacgatgaattgagaagtgataaaatgctgtctggcgaagataaaaggaaatacatgcaattagccattgaccaggcaaaagaagctgaaaagcaaggagaggtgccgataggggcagttgttgttgatcctgatggccgcgtagttggtactggatataacaggcgtgaacttgatgaagatgctacccaacatgcagaaatgattgcgattaaagaagcttgcagtaagttaggcatgtggcgcttaattgactgcagcttattcgtgactttggaaccatgcccgatgtgtgcaggggcaattattaattctagaataaaagacgtttatttcggtgcacttgatccaaaagccggagcttgtggatcagttgtggatttatttagcgtagaaaaatttaatcatcatccgcatgcaattcgtggactgtatcgtgatcaatgtgcacaaatgctaaaagattttttcagagcgattcgtgagaaacaaaaagcagctaaattagctcaaaaagaagtataaaatcagtaatttttaaaacaagatgctggtaatatttactgaaatacgttaacatagttgttgggcaatgtttgacctctgaattgtgtcaggaccggaaggtagcagcactaaggttgttcaggcatgtgccttttttgttagaatattaacagctcttagctcttcgagagctaggagcttttttacttaggaaagagaatttatggcttatcaagcgctatatcgtaagtggcggccgcggacttttgacagtgtgattggtcaagaagcgattaccgataccttaaaaaatgcgattaaacgtggtaaggtttcccatgcgtttcttttcgcaggaccccgcggaactggtaaaacatcttgtgctaagatttttgctaaggcattgaattgtactaatttacaagatggtgaaccatgcaatgagtgtgctaactgtattgcagctgatcaaggttcaatgccagatatcatggaaattgatgccgcttcaaataatggggttgatgaaattcgtgaaattcgcgataaggtaaaatatgctccaacggaaggtaaatacaaggtatatatcatcgacgaagttcatatgttgtcgatgggagcttttaatgctttgctgaagacattagaagagccaccagagcatgtagtatttattttagcaacgactgaattgcaaaaagtgcctgcgacgattatttctagaacgcagcgctataattttaagcgaatttccaaagaagaccttgagaagagaatgaaatacattcttgatcaagaaaatattaaatatgaagataaagctttagcagtcattgctcaagtagccgatggtgggatgcgggatgctcttagcattttggatcaactgttgagttacgagaaggaaagtgtcaactatgatgatgctttgcagattacaggctttgcagatcgagaaaatattgaaaaaattcttttagctttgttaaatcaggatgcaggtcaagccttgcagcttacacaagatgagttggctaaaggagctagttcaaaaaacattttagatgaaatcatcgatctaactactaagagtttattaatcgtcaaaaccgatgaaaataaacaggaaacttttttaacaaaagactttattgaaaaaataaagagcgtttctacagatagttattatcgattgattaatttggctaataatgccttgaatgatttacgctatactaatcagcaacagataccactggaagtgttcttagtagaagcaagtagtcctgcaccagtgcagacaagcgttgccccagctaagacagcaccagctcaacctgcacaaggtaatactgatttgcaggctgaactagcagcgctgaagaagcaagtcgttgatttaacacaaaaacttagtgaagtatccaataagccaagtttatcaacaaatcaggtatttcacttggatactgcggtacctaaagtggctcctaagcctgctgttaaaccaaaagagaagcaaactaaaaagccggttagaaaagtcaaaaaaactacggcagaaaatcgcaaacaagtatatcatgttcttgaaaatgctactcgaaacgatttagagacaattaagaatgtctggcctgatttacaatctgttttagctgtctctgaaaaagcactgcttgatgtattagaaccagtggctgctagtcctgaacaagttgttatgaaatgcaaatatactttatggtttgaaaatgcgagcgcagataatgatctgttagggcgcttaacggactatattgaaaagtttgctaaacattcttacggcattgtcttggtgccagataacgattggctggcagttagaaaagaatttgttgaaagccataaggatgagctacttgctaagaaaaagcaacagattgagattcaagaagaaaagtcagatgaaccagaagttgatccagaagtgattaataaggcaaaggatctttttggggatgcagtcaatattaaagactaaagtactatgagcaatgattataatattaaagttttaaataaagaaacaacattacagatcttactagaagatcataattctttgattcgttttggagatggagaattagatttaattagaggagcaagtattccgtatcaagattatcaaccggaattagctggttcgctaaaagagctcctgttagaaggcagcaatcgccgtttattagtaggattatctgatgtttttgaaaagttagatcgctatagtgattattgccgtaatttttatcaaaatagtttcttcccgaataatcatgacttgttaagagaagttgaattgcaatacaatgtatacgtttctactttcttttcacggccatatattgatttagtagataaaagtcacgctaaagattattttgctaaaatgaaacagctttggcaggatcgtgatcttttaattgtagaaggtaaatatagtcgctcaggcgaaggcatgacttgttttctaatgctagatcaattagtagactcatttgtccgccaactaatgcatatagtcgcaaaaaagttattgaagatgaaattattaaaaatgcagctaataggttgattttactgatgttaggtcctactgcaaaagtgattgtggctgatttgatagctcagcttaataatcaaatgattgatatagggcacatcgattcagaatatgaatggatgaaaatgggcgtaactaataaggtgaagataccgcataagcatactgctgagtttaattttgatgataaacaagttaaactagagaaagacgacaattttgataagcagattattagtataatagaataataaaggagaaaaattatgagtagaagacctaattttggtggtatgggcatgggcggcatgaacatgcaacaaatgatgaagcaagctaagaagttgcaagcacaaatggcagaagagcaggaaaacattactgctcaagaatttactggtaagtctgccgatgatttagtagtagctacctttactggtgaccgcaagttgaaggacatcaagattgataaggaagcaattgatccagacgacccagatatgttacaagatttggtaattgatgcggttaacaagggcttgaccaaaattgatgaggcaactcaggcaagcttaggtaaatacacgaaaggtttgatgtaattgcaatatccattaccaattgctcatttaattgatgcttatatgaagctacctggaatcggtgaaaaaacggcgactcggttggctttttatacgatggatatgcctgatcaggatgtcgatgattttgctaagtctttagttcaagtaaaaaaagacattcatcaatgtccgatctgtggcaatattaccgaaaaagatgtctgtgatatttgctctaatcctaatcgcgatcaaacaactattatggtagttgaacaaccaaaggatttgatggcttttgaggaaatgggcgaatatgacggactttatcacgtgcttcatggtgttctttcaccaatggatggaattggaccagaagagatcaatatcaagtctttaattacgcgtttgcaaaaaaatgatgctgttaaagaagtgattttggcgcttaattcaactccagaaggcgaatcaactgcgatgtatatcagcaaattaattaagccagctggtattaaggtaaccagattggccgctggtttgtcagttggtagtgacattgaatatgctaattccattactttaaagcgcgcagtgcaaggaagaacggcattataatggctaataaaaagcaagcaaagatcaaagcaatgggtgatcaaaagttggtagccgagattgaaaagctacaaaatcaaattgcattagagcaagatctcgatcaaacaactttagatttatccgaagataattatgtgcaaaatcgaatcttaaaggcaaagtatacttttttgtataatgaagctcgtcatcgaggcacaagatttagtggtattactaatgctattacccagtagaaaaagaccgaatattggtctttttttattttgaataaataaaaaatagtaggactgttaatctctatgaaacttctgtagaatagacatatggaggattttatgagaggttattttgttagttttgaaggccctgatggcgccgggaaaagtacagttttaaaagaagtattgaaccaaattggttcagagcttaagacacaatatcttgtgacgcgtgaaccaggcggttcaaaaattgcagaaaaaattcgcgacattattttagatcctgctaacgacaagatggacaataagaccgaagcgcttttatatgctgcatcacgtagtcagcatgtggaggagattattcgtccagctttaaaggaaggcaaagtcgtattttcagatcgctatgtcgatagttctttagcttatcaaggagcgggacgtgatttaggaattcaggaagttaagcaaattaatgattttgcaacggataaattagatcctgatcttacttttttcttagatcttgatcctgaagtagggttaaaacgaattgaaaagctgcgtccgggtcaggaagatcgtttggaacaagagaatcttgcctttcataaaaaggtttatgccggttttctcaaggtaaaagagacgtatcctgaacgcttcgtaactgttgatgctacgcagccaattgatcaggtagttgctcaagttattgcaacattaaagcaaagaatgccagagttattttaaggattgatttagatgaagttagtaattgcaattgtgcaaaaagaagactctaatgatttacaacgggcctttgttcaaaatgattttcgtgctactaagttagcaacttcaggtggttttttaagtcaaggaaatactacctttttagtaggttgtgatgacgataaagtagacgatgtattaaagattattaaggaacagtcccgagcaagagaggaaattgcaacaccacatatggtttcaactgggtatgaaattacacagcctttgaaagtgacagtcggtggtgcaacttgttttgttgttccagttgatgagtttaaacgcttctgatgattgatcttagtaatgttgggaaaaagcaaacccaatttttaaaaagagcatatgaccaaaaaaagttagctcatagttatctttttgttgatagcgatgaggcacgggcattgaatactgcatactggctagcttgtttgtttaattgtactggtgaaaataagccggatggcagctgtcaaaattgtcggcaaattttgtcaggtaaccacccagatgtattgctagtagcgcctgatggaaaacaggctctagggattgatcaaattcgtcccttaaaagaagaattagccaaaagcccagttgaaagtactcgccgtttcttctttattaatgaagcacaaaagttaactttagctgcagcaaacggtttattaaacttactagaagaaccagtagcgccagtagttacgattttgattactaacaatagtgatcagattttaccaacggtgcgttcacggacccagatcattaattttgacaatggtgagagggctagtggtaggactgcagtcttactggagaatggtttttcaaaagcagagattgaggaactgggtaatcttgataaatggaatcaggcaattaaatatttttatcaagaaatgctggaacacaacagcttagcacttgtcagtgcacataagctagctgctgatgctaagctagtgtcagagcagggttacatcttgcttcagttaaaattattggccgagcaagatttgcgtaatcctgctaaaagaataatggcggcgacaatgcttaagaatttaattgaaatagacaaaatgcgtttgagtaacgtaaatttacaaaatgcgttagattatctcgccttaaaatggaagtaggtgtttagattggatccatattcaaaactgaaaaagattgaagaaacaacagaaaatatgaccaagacgattgccagcttggaaaatgatattttagaaacattaaaagaaaacacggagttgaaggtagaaaatcaattactccatgagaagctggacaagttaacggcaaatcagcctgcacctgagactaaaacgcagagtggcttggaatcattgaagaagatttatgattcagggtaccacatttgcaatatgtactatggctcgcatcgtgatccaagtgcagattgtatgttttgtcttgatattttggacaattttggcgaaaaaaagggcaagaaaaaggacggtagataatgaaacgtcaaagcagttatgcaaaagatgaaggaaagctttatttagtgccaactccgattggtaacttggaagatattactattcgcgctaaaaaagttttaaccgatgcagattatgtagccgcagaagatacaagaactagtgggattttactggaaaaaattggggttcataataaaatgatctcttttcataagtataattccaaggagcgggcgccggaattgatcaagttgatgaaggaaggtgctgtgattgccgagattagtgacgcggggatgcccgtgatttctgacccaggttatgtattagtacaagaatgcattaagcatgatattccggttgtaccacttcctggtccaaatgctttttcaactgctttgattgcttccggttttaatcagccatttacttattatggctttttaccaagaaaatcatcggaacagaagacctattttgcacagatgcgcgataatagagcaacatcaattttttatgaagccccgcatcgtctagcaaaaaacctcaaaacattggctagtgtgctgccaaaagatcgtcaaattgtagctgcacgtgaactgaccaaaatccacgaagagtttatccggggtagtgtggaagaagttacgaattacttcaatgagaatgctccacgcggggaatttgtgattctagtttcacctaatacagaagcgcctcagcaactatcttggacagaattaattgacttagttaatgacttggttgaaaaaggtgaatccaagaaagatgcaattaaacaggtagccaagcagcatcatgtttctaagaatgaattgtatgatcaatatcaccaggattaattatgaagtataccgaagaatatcaaattgaatttaaagattgtgacgaaaatcggcgtttaaaattaccagcactagttgagttaatgatgcaggtttctgagcatcaattaagtcaaggtggtgctgggactgatgacttggttaagcgtggtctaggctgggtcgttactcaatatcattttgagattaaagacctgcctaaaccgggtgatcaagttattctaagtactgaagctagcggctataatcgtttttttgagtatcgtgattttggcgttagtacgcaagacggtaagccattagtgactgtaaaaagccagtgggtaatgctcgacttgaagaagcggcatatggtgccaaccgatactaaaatgatggaagattggggtgcaccactacttaaaaagatgccacgttttccaagattgcgtccgcaaaccgaatacgagcaaaagcgttcataccgtgcgcgttacgatgacttagatactaatcatcatgtaactaatagtcattatttcagttggtttgttgatatgttggatcgtaactttttaaaagaacatattgttacagcaattgatattaaatttgataaagaagttcattatggtgagagtataaattcttgcatggacttggttcaatatgatattattattacatctcatgcaattgaagcagaagatgggacagttaaggccgtctgtgaattaagttggcgtgagatatagtaacaacatgacgctattagttgtttttatttaggggaggaatcggtcaaatgaatacaaagaaaattttacgaacggatttacagcaactagtctttttaggtattgttgttgcaatgaaaattattctaagtcagttttcttttggtccagtaatggttaaagtgggactgggtttcattgggagtgtgctattaggatatctctttggtccgctctggggaacaattggcggtggaattagtgatttaatttcatctgcactttttggcgatcaaggtggctttttcattggttttactttaacagcaatggcaggcccatttatctacgccctgtttttatataataagccagttaaaatttggcggattattgcttctactattctggtgactgtaattgtcaatattggcatgaataccttatggctacatattatgtatggtatcaatttcaatgcggctttgatccaacgtttacctaaggagatgatcgttccttggattcaaatggttatcagctactttgttttacaagccgtttctcgtgttaaaataaaaaagtgatttaaagcgaaaagagaaaaatgtataaaatgaaaattttaagtgtttcgacagctactaatcatttgagcgtggccttgaatgatggtcaacaaattattgttgagaaaaatgaacgagatgagcgtaatcatagcgaacatcttgatccttggattgatgaaatcttaaaagataatgatttaagcttaaaagatattgatcgttttgcagttgctattgggccaggttcttatactggactaagaattggaatcactactgttaagatgtttgccagcattttagataaagaggttgtaggaatctcaactttacaagctttggctaaaggcgttcaagaagacgctttggtaattactggtttagatgcaagaaatgacaattattttgcggccggttatttaagcggtgctgtaccagagaatgtcattccagacggtcattacaatatcgacgttttaattaaggcgattcaagattatgcggccaagcatgaagttaagaaaattgtttttgtgggctcaggtcttgaaaagcaagatgaaaaatttaaagctttgaatattccatatgtttatggaactgaagaagagaatgtcatccatgctgggctaattggacaattagctgaaaatgcggttccagttgatccagataaattattgccacgttacttgcgtcgaactcaggctgaagtagactggcataaaaagacaggcaaaccattcgagccagatagtcattatgttgaagaagtttaatcaatttttccatcaacagttaaatcggattgatatgagttttaccccgtttattgcgaatgtaaacggtaagagactacaaattatgcaagctacagatgacaatattcctgacctgcttgtattagaggagcaagtttattcaggtcggacaccgtggaataagttttcatttgagcgagaactagagaagcggcataattgtctttatttggtagtgtattatgaatcgatgctagttgcatttattggtgcgcgttttactccagaagagacgcatattactaatattgcagtagcgccggcttttcaaaatatgcatattggtcgttacttaatgcaattgattattgatcgggcgcgtgaaaatgacagtgattgcgttagtctagaggtaagagtagataatgagattgcccaaaagctatatcgttccttaggttttgaaggtaccttcattcgtaaaaactattaccatgatactcataccgatgctatgaacatggttttatggttaaaaccacatcagattaaaagaaagaagtttacgttttgagtgaaaaaaatgttcgcattttagcttatgagagttcttgtgatgaaacttccactgctgtcattaaaaatgggcgtgagattgaaagcttaatcgtagcaacgcagattaagagtcatcaacgctttggtggtgtagtccctgaagttgctagtcgtcatcatattgaagtggttagtcagattactaaagaagctttggctgaagctaattgtacttggaaagatatcgatgcaattgctgtgacttatggccctggcttagttggtgctcttttaattggtgtaagtgcagctaaggctgcttcaatggcaacgggtattcctttgattggtgttgatcatattatggggcacattatggcagctcaactaaaagatgagattgaatatccagctcttgcattacaggtttcaggtggacatactgaaatagttttacttaaggatcctgttcattttgaaattatcggtgatacgcgcgatgatgctactggcgaagcatacgataagattggtcgtgttcttggggtaaactatccagcaggtaaaactatcgatgcctgggctcatgaaggcaaggatacctttaacttcccacgagcaatgatggaagatgatgactatgacttctcattctcaggtttaaagtcagcttttattaatacttgtcatcatgctgatcagattcatgaaaagttgaataagtatgatctggctgcaagttttcaagcagcagtaattgatgttttggctcataaaacaattcgcgcaattaagcaatataagcccaagacctttatcatgggtggtggagttgctgctaaccatggcttacgtgatcgcatgagtgcagaaattgcaaaactacctaaggcagatcaaccaaaggtgattttaccagatatcaagctttgtggtgataacgctgcgatgattggtgctgctgcatataatctttataatgataatcaatttgcggatttgactttgaatgctgatccatcattggaattgccatatgctaagagcatgttgaattaaatagaataactttttaaatcaaatacctagaacgattatttctaggtatttttttctactaaggcatggtccttaggatcttttaaatctaaggcgattgattcgtaagcgtcaaataaaatagtgtacttaaaaaccgtcccagttactgttatactgagacggttatttaagttcttttatttacaatttatctggatcttctcttgccacggtaaataagcttcaagggtttccgaatccagaatctcttcattcggtaatttctgaagcaaataattcaagtacttttcaggatcaaggccatttctcttggcagtttcaattaagcttagaataaagccacttgcagtagcaccctcaaaactttgagaaaataaccaattcttccggcccatgacgagtgattttacagcgcgttcagccttattgttagataattctaaattgccatcaagcaagacatgctcaaaagtagcttgatgcttgagggtataattaatggctcttcccaatttagagcctggcaaaacggtgattttatttttctcacaccagttgaagaactcttgcatcagaggcttgagctttgcttgtcttagctggtaacgttcttgtttgctcaaattctcccaggtttgttctaagtaaaacatgcgattgcagtagttgagtcctttttgggcaagggacttttcagaagcctgttgtggtacggcttcgtgaaactttcttctaacatgagcccagcagccaactaaagttgctttcggcaattgctcataagcctgccacatatcacagtgcaaataaccgggatagtttcctaaaaagtttaaggcaaccttgcaactccgggaaggatcatgatgatagagtgtaatcccgtattgatcatgtttgcctgaaaggaagacccaatagtaagtcttgattgttttactttctaagactgtataataagtttcatcggcatgtaaaattggccgcattaacagcttttgcttaagcagatcatacactggtttaaagtagtattgactgcttttcaaatcccaataatttaacatctgtcttgaaacttctagtcccatcttcttccagtcgctttcttgacgatagtccggcaccttcatttcatatttttgataaagtgaatgagcgatgagtgaagctgaacctagaccatggtttaggggagctttaggtactgcagctttaatgatcttgtcgctaagatttctttgactgcaatatttacatttgtaagcatgttggatatggtctaaccttttaagttgagctgggataaacaataattcttggcgaactgactgcttgcctatctcaatcagttcatgatgacaatcaggacaatgcttgtcgcctaattcatggtgaacctcttcagctggaagggcagctagtaagtcagcacgctttcgtttgtgagcttgtcttttataagtaatagtctgaacggcggcgtcggggacgttctccgtcatcttgagcatcaggttcatcaaagagacttgtttgtccatttaaaggcatttgttctgaagatttgccataacgtttttgcgttaagtaagctacttgttcacggaggagcttaatttcatcagttaagttttgaatagtagttgcttgttgtgcaataatcttttccaaattttcttgtgacatgagttaaacttcctcctaaatttattagttaaaagaatatcaaaaaagcgtgcgatgtcaagtgttagtagaattcgcacgctttcgtgttctttatttttggattgattgcgaagcccttcattagccagtcgacctgctcagaagataaagcttgaacttcattttgattcctgggccagttcaattttccattttcaaatcttttgtagagcagccaaaaaccttgtccgtcccaataaagggctttgaagcggtccttgcttccgccgcaaaagaggaagactttgccgctaaaaggatcaagttcaaactgttctttgactaaagttgctagtccatcaatgcctttacgcagatccgtcttgccgcaaacgatatagacttgccctaagtcactgagcttaatcatggcaagactttctcaagcagcttattcataatttcagggtctaagctgctgtaaaaattcagctctaagtcattcttctttaaactaagcaacagattattgcgtggtggacgagccttcttaggtttagaagaacggccaagtgccacaatgggttgttgtttttcgatcatattcttaacctccattaaattgatgagattagaatacctgaaaaatacggactaaaaaagatactcggttatatgacgcttacattgattccttgcctgcgttacaaattctaaagtattcgctagaaccatctgcgatatatggccccatgtgacgcgtgtcatcgcctgtttttctttcgatatgaattacccgggcaccactatctgcgagcattctggtacaagtagggcctgagaggacgtgggtaaagtcaataacgagcatcccgcttaaaggataaggtttgtttttatctaaatgactgttttttgcttctagctcagcataattaggttctgtcatagttgtgcgctttctattttaaaaagaaaaagctgttcgaagtgaacagctttttgatgagaataaattaattattcacccttgataacttcagtacgtggattcttaggaccttgagccttagaaattacgccttcttcagtcaatttttcgatttgatctggatcataaccaagtgaagctaaaatttccttgttgttttcaccaagatctggagcacgcttgtagttagaaagtgagaatggcaaaccaatagtcttgaacttaccacggttaccaccttggtcgatggttacgatagtaccatccttgttcaagtccgggccattttcaatttcgtgccagtcaagaactggacctacaggaataccagcagcaccaagcttcttagttaattcatacttgtcgtattgcttagtgtagctttcaattaatgggtaaatttcttccttgtgtaattgacggttgtgccagccatcaaagcgaggattagtttcccaacctttagccttgtaagtccgaccaataacttggccaccttcagtgttctcagcacgaggaattgccttgccccatttccagttagggtaaacagcgtagtgaggaagggcacctaagttgtctaacatgatttggttacgcaacttgatacggcagaggttcaatacagcgtcttgcattgactggtaaacaaaaataccttcactggtgtgttcacgttgaagaagggcagctaagataccaatagtaaggtgcatccctgggtttgagtcacctaaagtagcagctgattgagtaggaacgttggctttgccttcgttccaaccagtagcagaagcagcaccaccagcagattgagcaactggttcaaaggccttaacgttttcaaaacgtgaatcttcattgaagcccttcaatgatgcatagatcaatcttgggttcaaagcgtgaagcttttcccaaccaaaaccgttacgatcagctgaacctggtgcaatgttttcaacaaagacatcagccttcttagccaagtcgtacataatctttttaccttcatcagtcttgatgttcaaagtcaaagacttcttgttggcgttcaattgcaagtagtaaagactccatgaatcttgaatatcaagtaattcatttctagtagggtccccagtgttagtacgttcaatcttaataacttcagcaccaagccatgctaaaagttgagtacatgatggaccttattgaacttgtgtccagtcaacaactttaataccttttaaaggtgcatattcattttcttcagtcgtgattaattgtccttatcttcaagttgtgctaaatctaattctgggtttaagttaccaatgtgaccagattccttacccattgattcaggaatttgagcatcaataattgaaggattacctgattcgtaggccttttcaagagcatccttcatttcagcgtagttacttacacggtagctgtcaccaccaaaggccttagcgatttcagcatagtgagcattgtggcttaaaacagtaggtcctaattggtctttaactgggttacggtcaccattgtagataccaccattgttaatgatgacaacggtaacaggtaagtggtaacggcagataatttccatttccattccgtccaaaccaaaggctgagtcaccatgaagtgagatgactttcttaccagtttcaacagctgcagcaatggcataacctaggccgacacccattacgccccaagtaccagtatcaagacggtgacgaggcttttgcataccgattaagttacgaccaatgtccaaagtgttggcaccctcacttacgatgtaagtgtcagggtgcttttgcatcaagttattgataggttcaattgcactgtagaagcctaaagttggcttagcttcagaatcagcgattcttttagcaaatttttcattgttagcttcacaggcattcttaattgaatctagccagtcttgaggggccttaacgttagctttttcaaggggtgcgtttaatttttgtaaaacagaagtaatgtcaccttgtaatggggcatcgatctttctgtttgaatcaaattctgttgcgtcaatatcgacttgaacaaacttagcgtcttcattaaacaatggagcctcaccatttgaaagcatccaattaagccgagcaccgattaataagactacatcggcttgacctaaagtaaatgaacgagctgaagcagctgatgatggtgagtcatctggtacaacgcctttagccattgacatcggcaaaaatggaataccagtcttagtaactaattctctgacttctgcttcacttctagcataagctgagcccttacctaggataatagcagggtgtttagcgttctttaataattcaacagcacggtcaattgcatcatctgatggcaattgctttggagctggatcgactacttcatagatatgagcgtctgacttttgtgcaactgtgtcggcaactgttgcagcaggaaggtcaaggtaaacaccaccaggccgaccgctcatagcagttctaacggcacgagcaactgctaagcccatgtcttcagcacggtcaacacgataagctgctttacataaaggtttagcaacattgtattgatcaagtccttcatagtctccacggtcgaggtcgatgatatgacgatctgatgaacctgagatcataatcattgggaagcaattcttagtggcttctgctaaagcagttaaaccatttaagaaaccaggagcagaaactgttaaggctacaccaggcttgccggtaagaaaaccagcagcagcggctgcgtctacagctgcatcttctcttctaaattcataaaacttcataccctttaattcagctaaacgggcaaagtcagtaactggaatgccgacaccaccatgcatgttgtttaaaccgtttgcttgtaaagcatcgattaaaagtgcagcaccagtaagtgatacatcttgtgtcacgaaaaaaaattctttcaaaaaatccccaaatgcttatgtttatgcatttcaaaaccaagatacacctcttgaattgtatatacaggcacaattgaataataaggtacgttattttaatatgcgcatataaaaataagcaagtcctaatatattagaacttacttattatacttttattcaaaattgtccatttcttcgattgccttttcccaggcagaatttgcttcatctaatttctgttgtacatcagaaagctgttcttgcagtggccccaatttatcaaagcttgaagcaatttctggattggccatttcggtttggatttcttgctctcgttcttcaagctgttcaatttgtttttctgcattatcaattgcacgctgcaactttctcttttgagaatcacgttgcttttgctcttggtaagaaagtttttgctggctaatttgtttgcttggctcgacttctgtctcagcggcactattttcagccatagctgcttgttttgccttctcatcaagataataagaataattgccatcgtagactttagcatgcccatcgcgaactaaaacaatcttattagctagttgattgataaagtaacggtcgtgggaaacaaagagcagggtaccatcaaagtcttttaaagctttttctagtacttcttttgcttcgatatctaagtggttagttggttcatccatcagtaagaagttatcatgttcaagtgataaaacagttaaagttaaccgtgctttttgtccaccagatagttgacctacggtcttatcaatgtctttagctgtgaataaaaagctggctaagattgaccgtacatcgcgttcaggcatggtcttatgacgatccccaacagtatccaatacagttttagatggatctagtctttgtaattcttggtcgtaataaccaatctcaagggatgcgccatacttaattgagccactcttgggcgttaattgcttcataatagtcttaagcagggtagatttaccgattccatttggtccaatgatcgcgacgcgatctcctttattaatctggaaggaaatatctttaaccatggttttatcgggataaccaatcgtcaaatcgttgaaaattaatacttccttgccagaaggatgatcgcttgaaaaatgaatccgtaccttatttttatgtttaggtggagtaatccgctcaattttttctagttttttacgccgactttgtgcacgcttagtggtagttgctcgaaccaagtttttttggataaattcttcatcttttttgatttcagcttgttgcttttcataagcggcttcttggtccttatcacgttgctcgcgctgcatgacataggctgaatagttgcccttaaaagcagttaatttaccaaattctagttcaaaaatttgggctgctaaatgatctaagaaatattggtcgtgggaaaccacgaggattgcaccactgtaattctttaaaaatccttccaaccaatctagggtatctaaatctaagtagttagttggctcgtccaataacaacagagcaggtttgcgcaaaagcaacttaacaaaagctaaccgtgttttttcaccaccggataaactaccaatcttcttttgccaagtgtcttcaggaaacttaaagccattcaagatacttttaatatcagattgataagtataaccgcctttttgttcaaagttgaattgcttttgatcgtattgcttaagcaattcttgatcttcaggatgatctgcaattttttcttgtagttggactaagctttttctttcccttattaaaggagcgaaaacggtttccatttcatcccaaatggttttattttcatctaatgcattttcctgagcgatataaccaacatcaatgcctttattaactgtaaattcgccgtgagttggttcttgctcacctgtcattatttttaacagggtagtcttaccaaccccgttaggaccaactaagccgattctggcattggaatcgattgaaaaattaacatttttgaataatgtgttggccccaaattgttgttctaaatcgtgtccttgtgcaataatcataatttttcacctaaccactattctaccatatagcgcaaattgtttgtttttaagttaaatatgtgaaaaaatgatgatttgtgaaaaagatacttgcataagtactatcatagcaggtatgatagtagtgcttgattgtacattcacaaacatttaagtttggagggttcctatatggaaaaaataaaaatcccaaaagcaacggcaaaaagattaccattatattaccgttatttgattattttaaatgaagaaggcaaagataaggtttcttcaactgagctgtcagaggcagttcaagtagatagtgcttcaattagaagagacttttcatattttggtgcgttgggaaaacgtggctatggatatgatgtaaagaatttattgagcttcttcaagaaaattttgaatcaagatactttaactaatgttgctttaataggtgtaggtaatctgggacgggcgctgcttaattacaactttaagcgcagtaataatattcgaatttcctgtgcttttgatatcaataaggagattactggtcgtatcttaagtggtgtccctgtttatgacatggacgacttaaagcaacaactaagtgatcaacagattacaattgcaattttgacagttccttcaacagctgctcagaaaaccacagatgaaatggttgatgcgggtgtaaagggaattatgaactttactccgattcgtttatcagctccagctgatgtgcgagtacaaaatgtagacttagcaaccgaattgcaaacgttgatctatttcttagatagtgacaaagaaaactaaatttgagtaaaagaaacatactaacctagtgttggatcatgaatcgacggattcacgatctggcactttttattttgtctaaaatagaaagtgaagataaagcaaatcaagtcttcagctttttagacacttgatgtcgtaaaagaaacggactgctttaccacctattcttaagtctcttcgaagtctgtgggcacttagatgccgtgtttagaaaattagaattaataggttgataaagaggtttatcttcacagcggaggttatattatggaatcacaaattattttcggtattgatgttagcagtaaatcttccacagtttgtgtggttaatgaccggatcaaacaaggcgaatcttttagaatctctaatgattcctttggctatcaaaaactttatgagcaactgaaccaatatttgataactcctttagttgttttcgaagctactggtgtttattctctaagcctgcaagctttcttagaggattatcatattaagtatttgaagcttaatccgcttaaagcgaaaaagctaatggacaataatttacgccataataaaactgataaggtagatgcttatcgcctggctttaattcaatttaatgccccgcaaaagctgcgtgatccacagcccagagagtatcatgaacttcagaatgccagtcgctattatgaagaacttactaggagtatagttactactaaaaatcaattgcaccgcaacctccaatccactttcccacaaattgaagaaatactgtctcatccatctggcagaatttattgggcgcttgttagtcttttcccacatgctggatatgttctagaaaagaatgagacacaggtaactcaaatgcttaattctatttctggaataggacaacaaagggcacggtacttaaccacaagattatacgcttttgctagagaagcttatccttatgattccaaagatagtattatcgttagagctattcaaaggaacatttctaatttattttcactccagcaagaacgcgactatgtaattaactacatggaaaagctggctaaagcagtaaacgctcgtgctttatccatctatttgagtatcccaggggttgctagaattacagcagtgagattagtagcagagctcggtgatctaagacggtttagcacttcagctcaaattgatgcgtttgttggcattgatccaggaaggtaccaatctggtgaaaaagacagttctcttggcattaccaagcatggcaatcatattgccagaaaaatactttatcgagttattactcaaatggagacggtaaaggctacgcagccttgccatataactgattattatgacaagaaaaaacgatcttcaaatagacaaggctataagaaaatcgccattgcatcagtccataaactgatacgcacaatgtttgctcttatcaaacatgatcaattatatgattacaacatagccaccgaaaataaaagactttagctgaaatcaaataatcaacttaagtataagcaacctatggaaaaactacaagtattcataggcttatttgtggtactttcgctttttcttaaatttaaactcttatttgctttaaccttattcgcatcattaaaacaagtaaatttattttcttaaatcattgataatacttgactttgggtagaaaaaagccgattttcggctttttttcatgcagttgtttcacttttgattaatttgacaggcaaaatataattcttttggcgcaatttttcgtcgggattggaaattcgggtaagcaataacttaaccaataaagttgcaatatcatgaattggctgagcaattgtggatagttccgaatggtaagtttgaatttgctttgttccgtcaaaaccaatcacttttaattccttaggcactttaatgcctaatttttttgcttcttgtaaaactaacactgcagttaaatcatctgtgcagacgacgccatcaggctgatcattgactaacatatcatgaattttcatatttttaatgttggaagaatcagaaaaagcaactgaacgaatgtgggctgaaaagtgacattcctttgcttcatcaagataagctgctagtcgttcgtcagtcggattaccttttctgtgttcattgcccagaaagtaaattttgtgacaaccagcttgaaccaagtcatgtactgccaacttgatgccttgataattatcacaactaacaattggaacattatcagatagctttcggtcgaaagagacaattggcaaacctagttgttggtattcattgatacctagattgtgcgcaccagcgatgatgccatcaacttgattagcctgaagcatgcgcagatattcgcgttctttttctttgttttgtcctgcattgcataggattactttatagttttgttggaataaagtggtttcgatatcctgtactaattccgcaaaaaaaggattagtgatctcaggaaaaatcaaaccgactaatttcattttctttccttgtaatgagcgggcaatagaattgggacgataatttaattcccgcattgcggcaaaaactttatctttagttttttgacttaaatagccatggttgttgattactcgcgaaacggtagttacagagcaaccggcttttttggcaacgtcgcttaattttgctgccatagtatcacctgatgtttaaagaattgtttgcatttgccaaagcttgccagtgtagtcaatgtcttgagcaaacgcaatttttttgttggtctgatcggcaaagtagcgtccagtcaataccttttcaccatcattaacgaatacttcaattaatgaatgatcaacaaagatatcaagcttgaggtcatgatttggtgaaagcgtaatagctcgactttcgccataatcaactgctactttttgcccagcatgagcacgatctaatactaatttaccatttttggtatcgaaattgagctgtaaactgttacttaagtcattatttgcagctaaatgtaaagtgccactttggttagccttaattgttaattcaagttcaaattgttggccggcttgatcgctgactacttgattagatatgcttgcttcgtttttgcggatactgcttattgccttaactggcgtttgaattaacttgtcactctttaggtggagttccttcacttgactcaagcagttagcccagttttcatcatcagtagggtaagtagtgtcaggcaagccaacccaactgacttcgtaggcattaccatctggggcgttaaaggcctgagtggcataaacatcgaacccgtgatccaaattgtgtaatttacctggattaattaacttatgattttcccagtcaatatcatcagcaataacgtacatatttgggtaaatgtcatcataagctgctacttttttgtctaaaccctgaggacagaaaatgaccacgactttgccatcaacacggacgatgttgggacactcgatcatgtagcccatgtcttcgttggtaaagtctaagaagcccaattcttcccagttctttagatcctgagacttccaaacgtcaatgtgaccgtgtttttcctttttatcttgggcacctaaaattgcgtagtaagtgtcattttctttgataatttggggatcgcgaaaatgttcggtgatgtgatctggattcttaaataggatggttttgtctgaaactttattatttttatccatccaagcaccgatttgataaggagtacgtacccaattttcatcgcggtggttaccggtatacatgatgaaaagcttaccatcgatttcgcgagcagagccagaataagctccatgtgaatcagccattgtgtctggttcaatacctaagcctaagttttcccagtgaaccatgtcagttgatttgaagtgccaccatgactttagaccgtgaactgcgccgaatggatatgattgatagaagaggtggtaagcaccatcaaagtaggaaaatccattagggtcattaattaagccagaaataggatgcaaatgatagcgcatttggtaaggggagtttgcggcttgtgcttgcaaatgcattaatgtatcagcgtcccaatcttgataaggtaagtaacgtttttctcttgtccattccataaatatacctccatgaaagcgttgtctttttacatgtattttaagttagtatgaaaaatatgtcaaacgtttaacagaaaaaataattattaattcataagtaataaaataaataaagaattttatgtcaaacgattgacatattttttgaatgcgttatcataattagtgaattgagaataaaacgtttacataggagggatcaatatggaccacagaaaagtggctgaacgagtaattaaagacgtcggccgtgacaatattattgccggtgcccactgtgctactcgtctgcgtttagtattaaaagatgattcaaaagtcgaccaaaaagcattggataatgatccagatgttaagggtacttttaaaaccaatggtcaatatcaagtaattattgggccaggagatgttaatgacgtttacgatgagttcattaaaatcactggtttgaaagaattatcaaccgatgatttgaagaaggttgctgcagaaggtaaaaagaagaatccagtaatggatttcattaaacttttgtctgacatctttgttccaatcattccagccttagttgctggtggtttgttgatggctttgaacaacttcttgacttcaccaggtctgtttggaccaaagtcagttgttcagatggtaccgaatgttgctggtatttcaagtatgattcaagttatgtcagcagctccgtttatttttatgccaattctagtcggaatgtcggcagctaaacggttcggtgctaaccaattcttgggtgctacaatcggaatgattatgacgacacctggactccttggtgcaaatcacttctgggacatttttggcttgcatgttgcgcaaactaactatcaataccaggttattccagttttagtagctgtttgggtattgtcaattttggaaaagtacttccacaagcacttgccatcagctgttgactttacctttacgccacttctttcaattatgattactggctttttgacttttacaattattgggccagtcttcaaaggcgtatcagatggtattaccaatgctatcgtttggctatatgacactactggtgcctttgggatgggtgtctttggtcttacctattcagctattgttactactgggcttcatcaaagttttccagcggttgaaactcagcttttagcagcctttgctaagaatccagccagctctggtgactttatctttgttaccgcatgtatggctaacgtagctcaaggtgccgcaactttcgctgtttacttcttaactaagaacaagaagatgaagggcttggctagttcatcaggtgtttcagcacttcttggtattactgaaccagcacttttcggtgttaacttgaagtataaattcccattcttctgtgccttaattggttcaggtgtagctgctgcttttgcgggcttgatgcatgttactgcagccgctcttggttcagctggtttcttaggcttcctttcaatttatcctaagactattccaatgtgggttgtttccgtattaattagttttgctgttgccttcatccttacttatgtttatggtaagggtcatttgaaggaagaagttgctgaacaagatgttccagtaaacgacgcaactgattatgctgaagaaactcaaaaggctgaaaagcttggtaaggaacaaatggcattaaaggatgaagttattgcttcaccagttgatggtactcctgagagtttaactaaagttaatgatcaagtattctctgctaagttaatgggtgatggtgcagccgttattccaagtgatggtacgatctattcaccagttactggtactgtgactattgcttatgaaactaagcatgcttatggcattaagtcagacgatggtgcagaagtattgattcacattggtcttgatactgtaaaccttaagggcgagcacttcgaaagtttcgttaagcaaggtcaaagagttaacaagggcgataagcttggtacagttgaccttgatgctgtgaaaaaggcaggctatgatactactgtcatggtagtaattactaacactgccaactatgcaaatgtttcaagaattactgatgcgggtgacaagcacggcgacaagttgattgctgttactgcacacaattagtttcttctactcctctagaaaaaattaaaacaattagaataaaagacgctaagaaagattgtttcttggcgttttttagtactaagtgttgcacttcaattttaagtttgagtaaaatgttctctataaagaaaaacaaagtgagggtatgttttatgaagttaaaaagtggagttattggagtattagtaactggattaactgtctttagcattaatctaactagctctaaaataaaggcagcgataacagtgcctaatcctaagacagattatgtagttaaaactacttctaatgtgtataagagtaatggtaagaggaccagttttaagacacgtggtcagatacaaaccggtaatgttccagtaattgaatcacaactatatgaaggcaagttcattaatgtgcaaggaactaagacgattaatggtactgcttattataagatcggtcctaacgcatacattaaacaaaataatgttttaaattatgctcaagaaaaagcaaagcttgaggcatatcaggcacaagatgatgtgaatgatgattcagatcagtcaacagaattaagctctgatgatgtgaattttgacatagcttggtatgacaacattaatgaggatccatctccagcgatgttcgatgattcaggatatcataatagagtgattaagaatgctcgtaaattattaggctatttcacttatggaacaggtgcataccgaactaattttggcagttggcgtcatcctaataaaaacggttcaactgattgttcaggatttgtgtggatcgtaatgaagagagcaggatatcgtgtaggaaatgctccattttttactctgccaatggaacgagatgctaaaagtactcatggctatttgaagaaaatttctgccaagaatattcgcccaggtgatattgtgattgttaatactggcaatggtgttggtcaaaacggacatgcagcaattgttgatggcaaatatgatggttgggacacgcaaattattgaagagggcggcaacttaggtgtagatgatgtgcaccgctctagtttaggtagctcactgagcgataagctggccaaaggtcgaatcacttatgctcgccccgttaaatagtatgctctatgctataattttgctaatcaataaaggataataagaatgaaaaagaacagcacgcttaaacatgtctggattatgacggctgtctattgggtagtaggtattctaagtattttctggggtaagcttgatcatacttttgcgtctcaattaaaagagatcaataatatttacgtgttagttttaataattatcttaagcttgccgctacttttatcgctgttattgtcggttaaagtaaaaatgccacgtttgatctgcaatccactagttgctgtaatttatctattagtggtaattgcagcaggtgtagcatataacttacaaaatattattggctacttcttcccaatcatcctcttcattattatggcgctagttgctgttttctatgctttggttaagacttttagcagcagaaaaagtggtaaatatttttttattgatggtaaagataagaaagaatgccatgatttctgggatgcttataagaagtactatgtaatgggattaacttacggcattattgatggtttgattactgtaattagttaaaaaagttaagaaaaatcaaaattagcactcaattgaaaaaagtgctaattttttcttgctttttttcacaaaacagtttattatcatatttgtaagttagcacttagcaaataagagtgctaatgattaatacagtaataaaaaatataatgaagaaaattaaacataagggggactaaacgtgttacaaccaattggtgatcgcgtgatcgttaaagttaagaaagaagaagaagaaactgttggtggcatcgttttagcatcaaatgctaagaagaagccaactgaaggcgaagttgtagctgttggtgaaggtgcttacgcatcaaacggtgaaaagattccaatggctgttaagaagggtgacgtagttctttacgataaatactcaggcactgacgttgaatacgaaggtgaaaagtacttagtccttcacgaaaaagacattttagctattgctaagtaatttagttaaaatttccaacgataattaagtaaattaaggagcatagataatctatggcaaaagatattaaattctcagaaaatgcaagacgttctcttttaaagggtgttaataagttagctgatactgttaagactactattggtcctaagggtagaaacgttgttttggaacaaagttacggcaaccctgacatcactaacgatggtgttaccattgcaaagtccatcgagttaaaggatcactacgaaaacatgggtgctaaacttgttgctgaagctgctcaaaagactaatgatattgctggtgacggtactactaccgcaactgttttgactcaagcaattactaatgaaggtatgaagaacgtaactgctggtgctaacccagttggcattcgtcgtggtattgaaaaagctactgaagctgctgttaatgaattgcacaagattagccacaaggttgaatcaagagaccaaattgctaacgtagctgcagtttcatcatcttcaaaggaagttggtaacttaatcgctgacgctatggaaaaggttggtcacgatggcgttatcactattgaagattcacgtggtatcaacactgaactttcagtagttgaaggtatgcaatttgatcgtggttacttatcacaatacatggtaactgacaacgataagatggaagcagatcttgataatccttacattttgatcactgacaagaagatctcaaacattcaagatatcttgccacttcttcaagaaattgttcaacaaggtaagtcattattgatcattgctgatgacgttactggtgaagctcttccaacacttgtattgaacaagattcgtggtaccttcaacgttgtagctgttaaggctcctggctttggtgaccgtcgtaaggctcagttacaagatattgctgctttgactggtggtactgtgattactgatgacttaggtcttgaattaagggacactaagattgatcaattaggtcaagctcgtcgtgtaactgtaaccaaggactcaactactattgttgacggtgctggttcaaaggatgctattcaagaacgtgaagattcaatcagaaagcaaattgaagaatcaacttcagactttgacaagaagaagcttcaagaacgtcttgctaagttaactggtggtgtagctgttatccacgtaggtgctgctactgaaaccgaattgaaggaacgtcgttacagaattgaagacgctttgaactcaactcgtgccgctgttgatgaaggttacgttgctggtggtggtactgctttagtagacgttgagaaggctatcaatgatcttaaggctgatactgcagatgaaaatactggtatccaaatcgtattaagagctttgtcagcaccagttcgtcaaattgctgaaaacgcaggtaagaatggtgaagttgttttgaaccacttactcaagcaagaaaacgaaattggctacaatgctgctactgatacttgggaaaacatggtagatgctggtatcattgacccaaccaaggtaaccagaaccgctttgcaaaatgctgcttcaattgccgctcttctgcttactactgaagctgttgttgcagaaattcctgaagaaaagccagctaacccagctccacaagctggtgcaccaggaatgggtatgtaattatatatcttaatgctttagcatttagatatataattcttgattacgaagtaatcaagttcatttacagtgctttagcactaaacttatgcacaaactctcactctagttcaaaaacaaatataattaaaatgacttcgaagttaaacaatcagttcagcttcgaagtttttctttttgtagcgtataatattgtacgtaactctatctaaaatacgaaataggaaagagacataaatgacggaaaaaacaactccaatgatggagcaatattacgaaattaaaaaacaatatcctgatgcctttcttttttatcgcgtcggagacttttacgaactgtttgaagatgacgcagttaaaggtgcacagattcttgaattgactttaacgcaccgatcaaatagaactaagaatccaattccaatggcaggtgtgcctcatatggctgtggatacttatgtaaatactttagttgaaaagggttataaagtagcactttgtgaacaacttgaggatcctaaaaaggccaaaggcatggttaaacggggaattattcaattagtgacgccgggaaccatgatgaatgaaggcccaaatgatgctaaagattcaaattacttaacatcagtaattaccactaagagtggctttggtttagcctacagtgatttatccactggtgaaatttatgctactcatttaaagagtttcgatgctgtttccaatgagctcttgtcacttcgtactcgtgaagttgtgtataacgggtcattatctgaacaaaataaagactttatgcacaaggccaacattacgatttctcgacctactccaattgaaggtgaacatgctgaaatttcttatgttgaacagaatttgactaatggggctgaaaaagaggctacccgtcagttagttggctatttgctttcaactcaaaagagaagtttagcgcacttgcagattgccaaaagctatgaagtaaatcaatatttgcagatgtcacatactgtgcagaataatttggaattggttgcttctgccaaaactggcaaaaaaatgggttcacttttctgggttttggataacacacacactgccatgggtggacgcttgcttaagcagtggctagctcgtccattattaaacatggatgaaattaaccatcgtgaagaaatggtgcaggccttgcttgatggctactttacacgagaaaatgcagttgatgccttaaagggtgtttacgacttggaacgtttaactggtcgaattgcttttggtaacgttaatgcgcgcgaattactacaattatcacgttctttgcaggccgttccagttattttagatgctttagagcaatcagattcagatatcttggtcgattttgctaaaaaaattgatccattaaagggcgttgccgaaatgattacttccactatcgtgaaggatccacctgtgttgactactgaaggtggcctgattcaaggtggggttgatccgcagcttgatcgctatcgggatgccatgaacaatggaaaaaaatggttggctgaaatggaagcagatgagcggcaaaagacaggtattgataacttaaaggtcggttataacaaggtctttggctattatattcaggtttctaacggtaacaagtctaaggtgccacttgatcgttatacgcgtaaacaaactttgactaacgctgagcgttatatcacaccggaactcaaggaacatgagaatctaattcttgaggcacagacacggtcaactgacttggaatatgatttatttgttaagctgcgtgaggacgttaagaagtatatccctgctttacaaaaattaggtgggcaactagcagcgctggatgtttattgtggttttgctacagtagctgaacaaaataattattgccggccaacttttcacgcagataatcaagatattaatgtgactaacggccgtcatccagttgtggaaaaagtaatgacggctggttcatatattcctaacgatgtcaaaatggatgaaggaaccaacatttatttaattacaggtcctaacatgtctggtaagagtacctatatgagacaaatggctttgattgcgatcatggctcaagtaggttcctttgtgccagctgatagtgctgatttgccaatttttgatcaaatttttacaagaatcggagcagctgatgacttaatttcaggtcaaagtacctttatggtagagatgagtgaagctaatgaagccttgcagtatgctactaagcgcagtttggttctctttgacgaaattggtcgtggtacggctacttacgatggaatggctttagctggtgcaattgttaagtacttacacgacaaagttggtgctaaggcattatttgctacgcactatcatgaattgacagtgatggatgagactctggatcatctgaaaaatattcacgttggtgctaccgaagaaaatggcaagttaatcttcttgcataaaatcctacctggacctgctgatcaaagttacggaattcatgtagctcaattagcaggtttgccgcgcaacgttttgcgagaggcaactaaattattaaagcggcttgaagcacaaggcagtgaactagcaccagtttcgcagcaattagatttatttgcagagcctgtggaaaacagtgttgaagaaactgaaacacaaaatgacaagcccgcaataactgatgcacaacaagatatacttgatgatatttctaatctttatttagcagataagacaccgttgcaggttatgcaaatggtagctgattggcaaaaagatttaaaggatgacgattaatgagcaaaattcatgagttatcggaaactttaactaatcagattgcagccggagaagtaattgagcgcccagctagcgtagttaaagaattagtagaaaactcgttagatgctggtgctactcgaattcgcgttgattttgtagatgctggtttgaaacagattgtagttcaagacaatgggacggggattgcacgtgatcaagttgatctagcctttacccgacatgcgacaagcaagattgccaatgaacacgatttatttaaagtttccactttaggcttccgcggagaagcattagcttcgatttctgctgttagccatgtggaaattctgactgcaactgaaaacgcaattggtattcgagctaactatagtggaggcaataaaaaaggccaagaagatgcagcggctcgtaagggaacaaaaattacagtcaaggatttgttctttaacacgccagccagattaaagtatttgcgtagttcaagaactgaaattatgaagattgtggatattattaatcgacttgtgttaggttatccacatgtgtcttttactttgtcaaatactggcaaaattttattaagaacgccaggaaataataatttaaagcaaacagttgctaacgtgtatggccgtcatatcgcagaaaaaatggaaaaatttgaggcaaaagacagcgattttaagattacaggtctgatgtctaaaccggaattaacacgttctacacgcaattttatttcgattctcttaaacggccgctatattaaaaattttcaattaaatactgcgattctggatggctatggctcaaaattagcagcgcggcattatccgattattgtgttagcaattaaagtagatcctttgttagtggatgttaacgtgcatcccactaaacaggaagttcgtttatccaaggaaaaagaactgggtcgtttaatcaccagtgcaattagtaatacacttgtggaaaaagttggacaaattagcgcttttgctaatttggaaaataaacgtgatacgctagttgatcagcttagttttaacttaaatcaagatgttgtaaatacagctcgtaaaaaagaaccggaaattcgcgaacaagaaaagccaaaatttttaacgattgaatctgatgattcagaagataatattcaaaatgaggcggtaaagcaggatagtgaaaagaaatatgttgatcttaatcagccacgtgaagatgatcaatatatcgttactaagacctggaaacaaaatgttgctctgcagcaagcactaacgccatttcctacaactaggactaatcaggaagtcatttcaagtggggatgaaactttagctaataatctgcctcgcttggtttatgttggacagaccgatacttatttatttgcccaacataatggcgacctatttttaattgatcaggttgctgctagacgaaggttaaaatttgagcaaatttttcacatgataactgccaaaaaagtagtacaacaaggtttgttaacaccaattattttagaatttggtaatcttgattttatgcaaattaaggatcaagtagaacagattaagcaggttggaatctatttggaagattttggacaaaatagttttattgttcgttcgtatccaacttggattcacgataatgtcgaagattcaattcggaagattttagatggttatttgaatgtggataaaggaaaggcaaagaacctgtttagccggatagcagcaatgcaagctaagcgagaaattactggcaagattaaattatctgcagctgaagctgagcaaattttacttgatttacgcaagtgtactgatccatatcatgatgcagatggacggataattttggttagaatgagccaaaatgaattgagaaaaatgtttaagaaggatgaataatgtacgaatattttgaaggtgtgattactgtggttacaccaagctatgttgtagttgatgtcgggggcgttggctacaaggtctatagtcctacaccttttgcctatactcaaggccaaaaagctaaggtctttattgagcaagtggtgcgtgatactggcattactttatatggttttcaaagtcaagatgataagggcttgttcttaaaactacttagtgttagcgggattggtcctaagagtgcaatggcaatcatggcagctgaggatagtaattctttggcggaagcgattgaacaaggtgaagttaagtacctaactcgttttccaggtgtgggtaaaaagacggcttcacaaattgtgcttgatttgaagggtaaattaggtgattatgttgctcggcttgatcgtccagacaatggtgagaatgtgccgccagcattaaatgatgcactgcttgctttaattgctttgggttatacccaaaaagaagtggatcggatcacgcctaaactggagaaagttgctgcaaatactgcagatcaatatattaaaaagggcttagcattactgcttaaaaagtagatcttggtataatagaacagatgattattttttaaggaagtgaaactggtggcagaagatcaagtaacttcaggtgatattgagaatcctgaagaacaacaaatggaactttctttgcggccgcaaacgctcgaccagtacttaggtcaaaagcgggtcaaaaaagaaatgagcatttatattaaggcggcgcgccaacgtgatgaagcattagatcacgttttgctttatggaccaccggggttaggaaagacaactttggctttcgtaattgccaatgaattgggagttcatttaaagagtacaagtggtccggccattgaaaaggcaggcgacttggtggcacttttgtccgacttagatcctggggatgttttgttcattgatgaaattcaccgtttagctaagccagtagaagaagtactctactctgcaatggaagactactatatcgatattgtgattggcgaggggcagactactcatgcagttcacgtgccgctgccaccatttactctaattggggcaacgactttggctgggcaattgtcagcacctttgcgtgatcgctttggcatcgtagagcacatgcagtattacactatcgatgagctagaacaaattgttttgcgttcaagtgatgtttttcacacttcaattgcgcctgaggcggcccatgaattggcacgacgctcgcgtggtacacctcgtgttgccaatcgcttacttaagcgggtgcgtgattttgcggaagttaagggagaaaaaacaatttcgctcgagactactgaaggcgcgttaaaacaattgcaggttgacgatgagggacttgatcagacagaccgcagattattgagaacgatgatcgaaggatataatggtggtcctgttggtattcggactttggcagctaatgttggtgaagatatggaaacgattgagtcactatatgagccatatttgttgcagcatggttttattttactcacgccgcgtggcagaatggtgacggataaagcatatttacagttaggattaccaattccaggtgataaatagtcccattttctgtataatggttataatatctagaaaataattttaatgaggtggaaattttgaacattttatttttagcaaatgccggtgctgcagcaagtagcaactggatgatgatcggtttatttattattttgatcgctttcacttactttggtatgattcgtcctcaaaagaagcaacaacaacaaagaatgcaaatgatggacaaattgaagaagggtgacgaagtcatcttagttgatggtttgcatggtaaggttgacaagatcaacagtgataagactatcgtggttgatgcagatggcatttacttaacttttgaaagaatggctgtccgtcgtgtgattccagttgctgcaccagcaactcctgcagctgaaactaaggctgaagctccagcagaaaagccgaaagaaaaagcagacgaaactaaaaaagaggataagtaatcatattacttaagagcgtcattttaggcgctttttgttttgctaaaaaaatccttgttgtaaaatagaagtgataattttagttcaaagaaagggatctgaaatgaagaatattcccgttgtaatgattctttttggtggtagtggtgatttggctcaccgcaagctttatccagctttgtttaatttgtatgaacaaggcttaattcacgacaactttgcagtaattggaactgctcgtcgtccttggtcacatgagtatttgcgtgagcaggttagtgatgctattcatgaaacgcacgatactgttgatgaaaatgagttgaaagcttttgcaagtcatttttattatcaatcacatgatgtaactaatgtggaacactatgagattttgaaaaacttggcacaagagctcgatgatcgttatagtgcacaaggcaatcgtctcttctacatggctatggcaccaagattctttggcacaatagcaacgcatattaatgaccaagacttgactggtagtggctttaatcgaattgtagttgaaaagccatttggtcatgatttggcttcagcagaggaattaaataagcaaatcacggcttcatttgatgaaaatgatatttttagaattgaccactatttaggtaaagaaatggttcaaaatatcatgccaatgcgttttactaacccaatggttcaaaatatttggtgcagcaagtatattaagaatatccaagttaccttggcggaacgtcttggcgtggaagcacgtggaggttactatgatacttcaggtgctttgcgtgatatggtacaaaaccatatttttcaaattattactctgctagcaatgccagaacctaaggatctttcttctgctagtgttcaccaagccaagcaagatttgcttaagagtttaattattcctacgccagatgatgtcaagaaatactttgttcgtggtcaatatttgggtagtgatactacttttgcttataagcaagagccaaatgttgatccagagtcaactactgaaaccttcgttgcaggtaaagttaagtttaatgagggaccaattgctggcgtaccaatttactttagaacgggtaaggaatttaaagaaaagaagaaccggattgacattgttttaaagcatattaataatccatatgggcaagctcattctaacaatattacgatcgtgattgacccaactagtgaaatttactttactattaatggcaaacgaattgaccaaccaggaattcgccgtgaaaacttaacttatgaattttcaaaagccgaaatggctaaggtacctgatggttatgaaagattgcttcatgatgtttttgtcaatgattcaactaactttacgcactggagcgaattgaagcgttattgggaatttatcgatgcagttgaagatgcttggcagaaggaaaatgaagcaggcaatccagccattgcacaatatttgccatacagaatggggccaaaggaagctaatacaatctttgagtcaccaactgaacattggatttatgaataaagaaaatttattaccgcaaaatgacatccatcgtcggattattcatctggacatggatgctttttatgcttcggttgaaatgcgggagcatcccgaatggaaaaataaggcattgattgttgggcaagatccacgacaaaatggtggacatggagtagtggctacttgcaattatgtagctcgtaagtatggcgttcattcagctatggccgcaattcaagcagtacgtttggttcccaaggagctaatagtttttactagaccacgatttgataaatatcgtgcagtgtcagctaaaatccattcttttatgcatgatgtgacagatcaggttgaatcagtggctttagatgaagcttatctagacgtgacacatccaaagatagagcaggagtctgcagttcaaattgctttagatttacagaaaaggattcggcaagaagtaggcttaaactcgtcttttggcgtttcctataataagtttttagctaaaatgggatcagaatacgccaaaccgtttggtcgaaccgtaattttgcctagtgaagtgcagaactttttagcaatgcaaaagattgagaagtttcctggtattggaccgaagacgcaagaagagctgcatcagatgggtgtttatactggggcagatttacaaaaaattgaggttttaaccttaattaaaaaatttaagaaaatggggtatattttagcccaacatgcacgtggaatagatttaagacctgttgttacagactcagaggctaatcgaaaatcaattggcatggagcggacttacgagcctgcaatttatactgaggatgaagccctaaccaatattcgtaactattgcaatcatttggaagcagcattaaaaaaacgcaattttaaggcaggtactgttgttattaaagtaagaaataataattttgatacggtaaccaagagaaaaaagttgaaaacaccttctgatagtcacttagatttttatgatgtggctcgtgacttgttcgaagcaacaagttcctttttagatgatggaattcgtttattgggagtcactgtaactgactttgaaaagaaaaaatatcaatcaatcagtttgttcgactaataaataaagctatttttctggtaaactagatacagatatttttacaagatgaggagattaaaaatgagtagttttgatgacatttatgaaaaaatcttacaatatcctacaattatcttgcaccgccacactagtcctgatccagacgcaattggttcacaagctggtttagctagagcattaatggaaaaattcccggacaagcgcatactttgtgctggggaaaacgatgaaggcgacttagcttggattaaccacatggatcaagtcaaggcaactgattacgaaggtgctttggtaattactactgataccgctaatacaccaagaatttctaataagttgtatgataagggtgactttttaattaagattgaccaccacccagatgttgatccatatgctgatatgagttacgtagatccagatgctccagcagcatgccaaatcattgtagacttcttgaatgaagagggctttaagattaccaaggaagttgcttacccactttatgctggaattgtaggcgataccggtcgtttcatgtatccagaaacttcagagcatacttttaaggtggctgctcaattagcttctactggaattaacattactgaaatcgctcgtaatattgctgatgtaacttttgatgaggcaaaattgcaagccttggcaatggacaagatggaaattgatcccgttggtgcagcttttacaattttgatgcagtcagacttgaagaagttaggtttgactgatgatcaagcaaatgttgctgtatctactccaggacgtattaaagatgtgcttgcttggaatgtttttgttgaaaaaccagatggtactttccgcgtacattaccgttcaaagggccctgtaatcaatgaattagctgctaagcatgatggtggtggtcatgcattagctagtggtgctaacgctaaggatatggacgaagtaaagcaggtatttgcggaagtcgttgaagtaactaagaagtttaaagaagatcatgaataatatttttatagattcaagaattaaaccagctattcaggctggtttaaagaagatccattttgaaaagccaactaaggtgcaggagaaagttattcctgctatgttgtctgacttgagtgtagtagtgcaagcagcaaccggttcaggaaaaacgcatgcttatttagtaccaatttttaatgaaattgaagaagataaacgctatgttcaagcaatcgttactttgcctagtcgtgaattagccgatcagctttatcaagtagcacggcagctccgtgatgcggcagggatgcatttttcaattgcacatcttgcgggcagaactgatcgtgaacgtcaattagaaaagtatcaaaataatactccacaattggtgattgcaactccaggacgtttgttagactttgttcaaaagaaggtttttgcagttgatcaagtaaaaacttttgttatcgacgaagctgacatgaccttggacatgggctttttgaacgacattgatcaagttgctgctaaattgccgaaggatgtccaaattgctgccttttcagcaactattccagttaaattgtctaactttttacgcaaatatatggctcatcctgatgagatcgttattgataatcctagtgttattgcgccaacgattaaaaacgatttgcttgatattggctcaaaggatcgcaagaatgtcttgtacaaattgttaactatgggacaaccatatttggcgttggtttttgctaacactaagcaaaaggtcgatgagttgactaattatttgcaagatcagggtttgaaggtagctaaaattcacggtggggtaactgaacgtgaaagaaagcgcactctgcgtcaggttgagcaaggacagtatcaatatgtggtagctagtgacctagctgctcgtggcttagatattgatggtgttagtctggttgtcaattatgaaataccacgtgatattgagttcgtgattcaccggattggccggacggggcgtaatggcttatctggtcatgcgataactttaattcgtgaagaagaaatgaaccgaattgaagaattggaaaagatgggtgttcattttgacttcgttgaaattaaaaatggtgaattagtgccacgtaaacactatcgcagtcgtgaaaatcgtcaaagcaagaatcgtaagcttgataccaagctggtgggttacgttaaaaaagagaagagaaagcgtaagccaggttacaagaagaagattaagcgtgcgattcaagaggataatcgtcaaaaacgtaagttggaacagcgtcatgaggttcgtaaggcaaaacgtttgagaaagcgcaagcgtgaacaagggctttgacagaagcggattttgtagtacaattatttcagcttaagatatgttttttgatcaattatttcaaagagagagccagttagatgagaatggcttaataatagtcaaaaaatgctcctttaagtttcataattaagaatatcaagaggtaacaaacactgttgcaatcaaggtggtaccgcgcgtggagcgtccttgaagaaagcaatagtgttttttatttatttttagggagatttattttaatgaagaaactaaatagttcagagtttcgccaaatgtttttagacttcttcaaggatcatggtcacatgattatgccaagtgcatcattaatcccacaagatgacccaactcttctttggattaactcaggtgttgctaccatgaagaagtactttgatggctcagttgtaccaaaaaatcacagaattacttcatctcaaaagtcaatcagaaccaacgatattgaaaatgttggtaagactgcacgtcaccaaactttctttgaaatgcttggtaacttctcagttggtgactactttagagatgaagctattccttgggcatgggaattcttaactagtcctgattggcttggcttgccaaaggaaaagctttactgtactgtttatccaaaagatgaagactcatttaatgtttgggtaaaggcagggatgccagctgatcatattgttaagttggaagataacttctgggatattggtgaaggtccatgtggtcctgatactgaaatcttctacgaccgtggtcaagaaaacaacgacgttgctgaagacgatccagaaaacttccctggtggtgaaaatgcacgttaccttgaaatttggaacatcgtattttcacaatacaaccacttgccaaatggcaaatatgtagaccaaccacacaagaatatcgatactgggatgggactagaacgtgtgctttctattttgcaagatgcaccaaccaactttgaaaccgacttgttcttgccaattattcacgccactgaagaaatgactgatgacaagaagtacggcgttaacaaggaagacactactgctttcaagattatcgctgaccacgttcgtgccgtaagttttgcgattgctgatggtgcgcttccttcaaactcgggccgtggttatgttcttcgtcgtttgatccgtcgcgcagacttgaatggtcaacgcttaggaattaagggtgccttcctttacaagttggttccagttgttggaaaaatcatggaaagtcactacccagaagttatggatcaacgcggctttatcgaaaacgttatccaaaacgaagaagaaagatttcaatcaactcttgatactggtttgactttgcttgacgacttaatcgacaaggcaaagaattctaaggataagaccatttcaggtaaagatgccttcaagatgttcgatacttacggcttcccatatgaattgacttttgaatcagcacaagatgctggccttaaggttgacaagaagggctttgatgcagaaatggctgctcaaaaagagcgtgcacgtaaagctcgtggtgaccttcaatcaatgggacgtcaagatgtaactttaatgaacattaaggataagtcagtctttgaacgtgatacttacgaagaaccacatgcaaagctagttgacattgttgttgatgataagttggttgataaggccgatggcgaacatgctactttggtctttgacaagactccattttacgcagaacgtggtggtcaagttgccgaccacggtgacatttacaaccaagacggtgaattggttgccaaggttactgacgtacaacacgctcctaatgaccaaaacttgcactttgttgatttgattttgccagttgaaaagggtcaagaatacgtattgaagttagataaggaacgtcgtgaagggttacgtcactctcactcagcaactcaccttcttcacgctgctcttcgtcaagtcttaggtgaacacactcaccaagctggttcattagttgatcctgactacttaagatttgactttactgcaatggaaccaatgaccaagcgtgagcttaagaccgttgaagaattggttaaccaaaagatttgggaagctattcaagttaagactactatcactacccctgaagagggtgaaaagatgggtgctttagccctctttgatagcaagtacggtgataaggttcgtgttgttcaaatgggtgacttctcaagtgaattctgtggtggtactcacgtggacaatactaaccaaattggaatcttcaagattacttcagaatcagctgtcggtgctggtatgcgtagaattgaagctgtaacttctaagaaggcttatgaatacttggcaaaccgttcagacttacttgatgatattcaagaagaagttaaggcaaccaagccagataacattgtcgataagattgattcacttgaaagtgatttgcacgatgctcaaaagcaagttgaaactttgaacaagaagatcaatgctgctaaggctggtcaaatctttaatgacgttaaacaagctggtgacttgactgtcattgctgctactgcagatgttaacgggatgaatgacttgcgtgaacttgctgataactggaagagcggcaacaagtctgatgttttagttttagctgctgaaaatgctggcaaggctaatatgattattgctttagaccaaaaggcattagacaagggccttaaagcaggtaacttaatcaagatcgctgccccaatctttggaggtggcggtggcggccgtccaaacatggctcaagccggtggtaagaatccagcaggcttgaatgatgctattaaggcagttattgacgaaatttctaagaactaagaattaattaattgtgtttaagctttttttcaagtaaaattgttgacaggaggaataaatatgagttcgctagataagactatgcattttgactttaatcagaacaaaggaaaaaatgtttatgatactctgcaagatgtttacaatgcgcttgaagaaaagggctataatcctattaaccagattgtaggttacttactttctggcgatcctgcttatattccacggcataacgatgcccgtaatttgattcttaagcacgaacgtgacgagattattgaagaacttgttaagagttatcttggtaagaataaataatgcgtttattaggtttagatgtaggttctaaaactgtgggagtagcaattagcgatgagctaggaattactgcccagaagttggagactatccagattgatgaaagcagatataactttggtatgcgtccattgaagaagctagtcagacagtatgaagttgacggtttcgtattaggtttacctaagaatatggatggtacttctggtagttccgtagctagaagtaaggcatacggcaaacgactagaggaaaagtttggtttacctgtacattattctgatgagagattgacaacaattgaatcacgacgagtacttgttgaggatgcagggatccatgatcgcaagaagcgtaaacaagtaattgatcagatggcagcggtgctcatcttgcaaaattatttagatttacaccgaaaggattaaaatggcagcacaagttaatggtgacgatcaagatcgtcaaattactttgattgatgatcaaggtaatgaagaattgtatgagatattatttacttttcattcagatgattatgacaaatcttacgtgcttctttatccagccgctgttggcgatgatgaagatattgaggtgcaagctttcagttatgatgccgatgatgccggcgatgtaacaagtagtgatttgcatgagattgaatctgatgatgagtgggacatggtccagggagttttaaatactttcttagatgatgaccgcttgagtggtaaataataaaaagaggactggctgtggctggtcctttttgttagttttagaaaaaagataaaaatgaacaagaaaatattagagattttagaatttggcgaaattactaagcgcttgagtaaattagcgattactggtcccgctaaaaaagaagcggaggaattattaccaatgtcattaagttaagacattgacaattaagggtgcttttttagagatcgaatcatttggattcgatctctttttttgtataaaataaaggcgaaaagacctgccttttcgcttatcttatatattttaaaccttcaaaattattgccagaaagctggtgttaattatgaaagcccttcataagaatattctaaaacgtcttgatcaaattatcaataatactggggatcatattcacgattttattaataatcctcatgcttttaccaggaaacgcactttagatgcagcgacagtccttaaaactacaattaacatgcaaggtcagaatttaaacagtgaactctttagagcttttggcgaagatgcaactaaaaagaacgataaagtagttagtacttctgcctatgttcaacgcaaaagccagctttctcctgcttgttttaaacatattctgactgtttttaatcaagatctatttaatattcaactttttgatcatcactaccgtttgtttgccattgatggctctgactttaatcaaatctggaatccgaaatcgaataacattgtacaagcttcttctcataaaaagaaaccctattgtcaaattcacgttaatgccttatatgatctattgaataatacctaccaggattgtatttttcagcctaaatcagaaatggatgaacgcaaagcggctgttcaaatgcttaaagctttgaattgtggtccatatattgtaacaatggatcgtggctacactagtttcaatatgattgaaaactgcaatcgcctgcctaactgtcattacataatacgaactaaggctggacaaggcggagttaaagaaataacgacattgcctgatcaagaatgtgatcgtgagatttcctgcctggtaactacttctaactattactacatcacgcataaagccagtgagaatattcaccatgtccagcatcattatcgccaatatattaagtatcgctctaaaaatacccaggatctaagctgggattttggcgagttatgcacaataaaatttcgagcctgcaaatttagaattaacgatgccaaatcaggcaaagaagaatgggaagttgtgctaaccaatcttgatcgaaaaaattatccgctaaaaagaattaaagagctttatcatctgcgttggggtattgagacctccttcaagaaattgaagtattctttaggcagcgtacagttccattccaaacaagataaatttattgaaatggaaatttatgcccatatgattatgtttaatgcaatcagtcaaattgatgcacaggcctatattccgcaaaagcattgcaagtatcaatatgccatcaatttcaagcaatcatgcttgattattcagagcatgtatttggcttcttctttaacgcaagattttgaacggatccttattcagatcagctattataccattccaattagaccaggccgcaaggacaagagaaatattaagcccaaatcagctgtatattatttatatcgcgtagcttaaaaaagcagaatctgtgctatgcattatttgttgtacgaaaaaagcaccaatttaaccaattaaatgttaaatcagtgctttaaaagtctaatattaattgtcaatgtcttaacttaatgacattgaattattacctagtggtgattttgaacaagtacaaaatgagttaaagcagactttagctttgactaatttgctacgaattaagggacaacttcctttaacggactttcaggacgtacgtccaagtactaaacgtttaagcgtgaaagctaatttaaatgctaaggaattaggtaatttattattagtattaagtttagctcatgaaattaatgactttttggcagaaatagatccaaacaaactggatttaactgcaattgatgaaattttagatcaattagatgtgccggatcttttatttagagaattaaagaaatcagttgattatgatggtgaggtattagatacagcctcacatgaactagctcgtttgcgtcatgatatacgttctaatgaagaggaaattaagaataagatggatgcttatactaagggcaatagtagtaagtatttatctgagcaaattgtgactattcgtgatgatcgctatgttattccagttaagcaagaatatcgggcaaaatttggtggggtagttcatgatcaaagtgccagtggtcaaacactgtttatagagccggaagccgttttaaatcttaataaccgccaacagaatttaattgctcaagaaaaacaagaaattcgtaatattttgaagcacttatctaatttggctcgtgaagaaattactagtttgaataatattgcggctgcattaactgaactagatttcttgcaggctaaagccaagttagcaaaagaaatgaaggcaagtgagcctcgtctgacacaagaccattctttgaacttattaaaagcgcgtcacccattgattgacccagaaaaggtagtacctaatgacattcgtttaggtggtgaatttgatactatgctgatcacggggcctaacaccggtggtaagacaattaccttaaaaacagcaggattgcttcaattgatggcacagtctggattatttatcccggctgaagaaggtagcaaggttggcgtctttaagcaagtttatgctgatattggcgatgaacagtcaattgaacaatcgttaagtactttttcatcacatatcaatgacattattgcgatcatgaagaatgttgattctgagaccttagttttaattgatgaaattggtgcagggactgatccagaagagggtgctagtttggcaattagtatcttagactttttgcgtaaaaaagatgctaagatcatggtgacaacgcactatcctgaattgaagctttatggttataatcggccacggacgactaatgcctcaatggaatttgacttaaagaccttgtcgccaacttatcatttgcagattggtattcctggtcatagtaatgcctttgccattgcccgcaagctagggatgcgtgaagatgttgtcaaaaatgcccagaacttaatgtcagatgaagattctgatattaataagatgatcaccaagttgaatacgcaaaccaaggcagctactgtggctcgcaatcgtctgcaaaccagtttggatcggagccaaaaattggagcaaaagttgcaacaagcacttgattggtataaccaacgtgtacaaaaacagcttgattttgcacaagagcgagctaatgaagttgttgccaaacgccgtaaaaaagctgatgagattattgctcaacttgaaaaacaaaagaacatgggcgtcaaggaaaataagattattgaagctaaaggcgaactcaacagtttagagcgtcaggctaataatttggctcataataaggtcttacagcgtgaaaaacgtcgtcaccatgtaagtgtaggcgatcgagtaaaggtcctctcatatggtcagacaggtacgattactaagaagttatctgaacatgaatatgaggttcagatgggaattatcaaagttaaggttagtgatcgcgatattgagaggattgaaaagggcgaaagtactaagcctagacaaactgttagagcaaccagtgcggttagaagaagtaatgctcatagcgagctggatttgcgaggccaacgctatgatgaagcaatgactaatttggaccgatatattgattctgttttactggcaggacttgatacggttacgattattcacggtattggtactggtgcgattagaaaaggtgtttggcaatatctccgcagcagcaatcatgtaaagaactttaattatgcaccagctaatgaaggtggcaatggtgcaacaattgtacaattaaagtaagcgtcttacttgcaaaaagtaagtataatagaatatacttataacttaaacttcccacactaaataagccagtaatctcttgatcttgcttggctttaggcttctatattatttttgctagttttctttaacaatttttgcatgtatttgggtaaacgattgataaagtcagccgtgaattcagctatttgtgcttcactggcatgaaagacttgctttacgctggccagcattgcatcagtaatcaattgcaaggaatggctaaaagtaatgtccgccagctcatcaatcatgcaatagaacagctcgcctagcgtgcgttcatcttcatcgtcccgcttggcaactgacataagcatgtagcgagtaaaaactatggcaacatgagcggtcaaagcatcgtaagacaggccatgatattccgtacttagttttagataacttttgcaagttttgaaaaaaacctcaatatcccaacgcttgccgtagttgcggataatttcatcttcgctaagcgacatgtcggtacaaatgattgccagccaatccttgcgattggcacggtttctaacgcagacaatccgtgcatctattttagcaccgtctttgtcctggcgtccgactttgactgggattgacagcaggtagcgagaacggccgcatcgctttttacagctgcgataaatctgtttgatgtttttgcgttctccctcaaattcatatttgattttggagctaaccttaaccatggcaatcacatccagcttcctttgcttgagctggacgatttgatgtggatttgagaaccagctgtcaaacagcacgtacttggcttgatgacctgctttcatagcttggtcgattaaattaaccatcacgtctgtgcctttagtccgggcaagcatacgtctttggccagcaatggtgcgctgatcaaaaactttattttcgccaatcatattctgtagcttctgagaagacagcagcactgaattgattggcatgaaagaagctccatcagtccagcccagggtcatcatgcgaaaacctttcttgtaagtcattgatacatggtcaaaaactttggcgactaattctgttttcttgaagccggtcctagagaagtaggaatcatcgacaacaaagcaatcagcccgtttttctgaagtcaaagatcgcaagtggttattaatgatttgcgcagacagaagtgtggtgaagtggagccaattgacgtgaacgttgcgcataaaacggtaatatgagttcttggaaaaattttcttgaaaatgatccattttcagctgcatatataagctgcggtcacgaaagacattgcttaaaacgtaaagaaacaagctgaacaggctaatgcctttttccttgcggaagccacattttctcaacagcttgatcacctgaaacttcttgatgaagctgatgattgagtttgaaaatagttgttcattttgttggtcaggagatggtaaaatagacattggcacaagcctttcatgcaaataaattatgttttggtcaatataattatagcaatgaaaaggacttgtgccttttatatttgtcaaaacacgcagaatcacaatgaaacaagcaattttgcgtgtgggaagtttaagttataatataaataaatgaattgaaaaaatgtgaggtaataattatggttgaagcaattaatgatcaaaattttgaagaagaaactaagaatggtgtagcattagtagacttttgggcaacttggtgtggtccatgtaagatgcaatcaccagtaattgatcaattatctgaagaacgtcaagacgttaacttctacaagatggatgttgaccaaaatcaagatacagctaagaatttgggtattatggctattcctactttaatcgtaaagaaggatggcaatattgtagaccgaattactggttacactccaaaggaaaagttaaaccaaattttggatcaatatactgattaatttaaaaatcaaaaaaagcttgagacgatgttgccaatgtcattaagttaagacattgacaattaagggtgcttttttagagatcgaatcatttggattcgatctctttttttgtataaaataaaggcgaaaagaccagccttttcgcctatcttatatattatatattttaaaccttcaaaattattgccagaaagatggtgttaattatgaaagcccttcataagaatattctagaacgtcttgatcaaattatcaataatactggggatcatattcacgattttattaataatcctcatgcttttaccaggaaacgcactttagatgcagcgacagtccttaaaactacaattaacatgcaaggtcagaatttaaacagtgaactctttagagcttttggcgaagatgcaactaaaaagaacgataaagtagttagtacttctgcctatgttcaacgcaaaagccagctttctcctgcttgttttaaacatattctgactgtttttaatcaaaatctatttaatattcaactttttgatcatcactaccgtttgtttgccattgatggctctgactttaatcaaatctggaatccgaaatcgaataacattgtacaagcttcttctcataaaaagaaaccctattgtcaaattcacgttaatgccttatatgatctattgaataatacctaccaggattgtatttttcagcctaaatcagaaatggatgaacgcaaagcggctgttcaaatgcttaaagctttgaattgtggtccatatattgtaacaatggatcgtggctacactagtttcaatatgattgaaaactgcaatcgcctgcctaactgtcattacataatacgaactaaggctggacaaggcggagttaaagaaataacgacattgcctgatcaagaatgtgatcgtgagatttcctgcctggtaactacttctaactattactacatcacgcataaagccagtgagaatattcaccatgtccagcatcattatcgccaatatattaagtatcgctctaaaaatacccaggatctaagctgggattttggcgagttatgcacaataaaatttcgagcctgcaaatttagaattaatgatgccaaatcaggcaaagaagaatgggaagttgtgctaaccaatcttgatcgaaaaaattatccgctaaaaagaattaaagagctttatcatctgcgttggggtattgagacctccttcaagaaattgaagtattctttaggcagtgtacagttccattccaaacaagataaatttattgaaatggaaatttatgcccatatgattatgtttaatgcaatcagtcaaattgatgcacaggcctatattccgcaaaagcattgcaagtatcaatatgccatcaatttcaagcaatcatgcttgattattcagagcatgtatttggcttcttctttaacgcaagattttgaacggatccttattcagatcagctattataccattccaattagaccaggccgcaaggacaagagaaatattaagcccaaatcagctgtatattatttatatcgcgtagcttaaaaaagcagaatctgtgctatgccttatttgttgtacgaaaaaagcaccaatttaaccaattaaatgttaaatcagtgctttaaaagtctaatattaattgtcaatgtcttaacttaatgacattgcgatgttgcctcaagcttttttgatatatcacttattttgatttacttgcttttttagcaagtcacgaatttcttctaaatagtcggcctcagttggaccagcttctttttctttcttgggcattactctatttaaagccttgatcattaaaaataccacaaatgaaatgatcaagaagttaatgacagaattgatgaagctgccatatttaaatgtagcatccccaaccttaaaaacgaggttagaaaaatcaattttgccggcaaagatcccaagtagggggttgatcaagttttttactaaagattgtacgatagcagtgaaggcagcaccgatgattacaccaactgccatgtccattacattgccacgtgaaataaactctttaaattctttaatcatgctctactcctatatctaatatatctaaaaaaatgcgattttaactaaagtatatagtagtggttatttatagtctatcaatttgcttttaaccgaagcgagcgataaattgaactttcttttctttatctaaaatattaatttcacattcggtggttcgaccagttgatttttgaaatgcttccgcgatcattccgccttcaagggagaattccttgctggcgctattcaaacgatcagtgacagtttggccacttaattcgtaagtagtaaatgatcgtctttctttaactttttctagcttaccaaattcagccatgttgaagaattcaactaaatcatcataatcacttaaatcatattttcgcgcgattctcttgccagcccaataaagaattgaggcgtcatcatcgcctaaaatagttggcaaaaggaaatcgcggtaaagttggttaataaaatatacgtgctcgtttgtgttttctgtcataaacttgttcatcccttttattcttttttattttaccgtaaactagtataagtagaaaataaatttttgattttaagagggttttattatggataatcgtccgattggattattggattcagggctaggtggcctatctgttgcaaaaaaagtaattgaaaaattgcctaatgaatcaactgtttttattggtgataacgctcatatgccgtatggcgatcgaactaaagaagagattattgaactagttagaaaatcagtccattttttgttagataaaaatgttaagctgataatttttgcctgcaatactgcgacagcaatggctatgagtacgattcaagcagaaatcgatccacaaattatcggagttattcagtcggggagtttggccgcttcacggacaactaagaataaaaaagttgcggtagtttcaactaaagcaacagcagaatcacatgcttatgctaaagagatccgtttccgtgatccagaaattcaggtaacggaattagctgctcctaaacttgcaccacttgtggaggctcaaaaagatcatgaaaccaacttaaaagtagttaaagagagtttgacccccttacaaggaaaagactttgacactttaattatgggctgtacgcattatccattgattcagaaagaatttaaagaagcaattaatgataaaaatgttactatcttggatcctgcagatcaagttgcacagtatacgtttaatgtgatgcggcgcaatggtttgtttagtgatggtaatgaaaaagtcagtcatgaatattacactacaggcgatccaactagttttgatcatttagcaaggacattcatggatgatgcaactttaacatctaagcatgtggatacggagaatgaataatggttaaagaaattttatttgcgactggtaatcaaggtaaagcaaaagaactaaaagaagcctttaaacaagctggggtagatatcgagattaagacgaatgctgacttagacaatccgcctcatccgattgaaagtggccatacgtttgaagctaatgccaagattaaggcccatgaattagctgagtttagcaagttgcctacgattgccgatgattcaggtttaatggttgatgccttaaatggggagcctggtgttagaagtgcacggtatgcaggcgaagctcacaatgacgcaaagaacaacgccaagttattagctgaattaggcggtgtaccggatgaaaaaagaacggctaaattttggactacgattgtagtttcgatgccaggtgaatttgataaagacttggttgtgtcaggtacttgcagtggtcgtattttggccgcaccacgtggtgaagatggttttgggtatgatccattgttttatattccagaaaaagaaaaaacttttgcacagatgactactgatgaaaagaatgagatttctcatcgtggtaatgcagtgcgaaaattgctccaagaattgccagcttggttagaacaatttgattaaggtaaaaatagctcagttcgggtcattcgtatgatttgaactgagttatttttagtgaaatgaggtggatatatatgtcaaaaagtattggggaagcgctgaaagaggaaagacggtctttaggattaacacaggaacaatttattaaagggattattagtgaatcgttttattcaaaagtaggacgaggtaagaatgaaatagtagcagtagatttactaaagattttagctgctaataacattagtgaagaagaatttttaaataaactaaatgttaaggaaaataataatttagaggaagacttaaaagttcaattacttaatgcatattctattcatgataaaaagaaaatcagtatgttagtcccaaaaatacaaaatgcagctatggatgaaaatactaaaatatcagctcgtttgattgatgcagttgtaaataataagattaatgatttaactcaaagagaaattacacaaattaagagaaaattttttgaagttgatgattggaccaaaaatattacaaccttacaacttttttgtaattcaatgcttttgtttgattttgatgagctggttctttttgtaaaaaaactggaaaaaacatgtaaagggaagttgatgaaattaccatttaatactcaaaagataattgcatcgatttgcataaattattttcataattgttatacaaatgattgtagtcgaaactgtcaaatcttttgtgtaaatagttctttctcgtaaattgattttttaattatttatttaatcaaagtaggattctaaggtgtcctgaacctgaccaaagcctttatgaattcgattgaaataacggtcattgtagctcattgcctgaataccaataaaagcatcaagcgactgttcagttggaaactctgccttaggcttagctttgcgcttgatcacattgttaaatgattcaatcatgttagtcgaataaattgaagctctgatctgcttgggatagttataaaagaccagcagatctggttctatgtctttcaagcttctgataacatggctgtaaaccttgccccatttggtatagaagtcatgcaggacagctgtggcttcttctttgtttgtctgttgatgcacctgtttgaattcgttcatgatcttttcacgatcgtcgacgcgtactttagcgcagatattgcgcatgacatgaaccaaacagcgttgaaaatgagctttaggataagtcctggccaaggctgttttcatgccaacaacaccatcagaaagaaagagttcaacttgcttcaagcctctggacttcatgttttgaagcatctctgtccagacttcaatgttctcactaggagcaatgcagtagtcaatgacttccttatgtccattaggtttaatgccaatggcaatatagactgcttcacgctcaacgctcaaacgtttctcggcgcaaaggaaggtatgtcgcatccaaatagacgcagaaaaacttgtcgcttagcttgcgtttgtggtaagcctcaacctttggaatcatctgcttggaaatatttgatacctgagctggactgtaatggctgccatacatcttttcaattagatcggctatttccctggtggtcacgcccttggagtaaagcttgataatcatgctttccaagatatccgagtgctgcttgtagtcaggcagcgtgtgctgatgaaattgaccgttgcgatcccgaggcacttgcacttcaattgggccaaattgcgtatcaactttgcggaaataagcaccatttctagagttgccagtattccagccatttctggcatagggatcatagcccagaaaggcagtcaattcagcttctaacaagttattaacagcctgttgtagctctttgcgcaataaatcatttattttgtctggattgaatagagcttgagcaaaatctttggtaaaatcattcatgaaggagttcttctttctgtatgtgtttttttgttcaaaccaatcatacgagaaaggaactcctttttctaatgtttaaagaaataaatttaaggaatcattcatccttacacaaactattttacagtctcaagatgcaagctatggttatgaaataatagaagaattagctaatattccggattttggaatatatgtgatagttactaatttttataaggcatattttcaaggcaataaaaagcaaagtcaacagatattagatttcttgaatcagaatggactaaacgaaatatctagcagattgccatagtcatatatgaagacttaattcaaatatgaagagtattagatttttttaatgtttatactataattttaataattaatgtaactcttaggattagcctaagggttattttagtaacaaaattatttatgtggagaaagaaaaatgagatcgcaatatttccaagccacttttcgaattgcacgtaagtcgaaaaagaatatgttgcttgctgttttattggtactttgcatgatttttgctgtactggttgtagaaaagcagaaaatcaacgatggctaccgtcaatggcgagactacaatgagtcagttcatgttaatgcagattatttttctagcaatttgctacgaaaaaaggattacaaacaaacttttaataatctgaataaacaggctgagtatttggccggtgtacaaaatggtgaagtatttgattcgcctcaagattatttgcaaaattccaaaaagttagtgcaaacgatgctggcgggttatcaaaataattatcgcggtgcttcaacgctaaatgttccaccgaagtatcaactgcaacaaaaattagtagtttatgattatttgtaccaacatcacttagcaattgtcatgaattctaaagaatctagcacctacttaatctatattttaggattagtcggcatgttcttatttttctacgttttatttattgctagtgatagctggatgattaatttatcacatccaactctgcttaaaaatattccttatcagattagggatgaagttgaaggcaaatttatcatcaatcttgctttgactttgcttccgttagtgattggtgtgttaggaagttacttatttgctggttttaagaatggctttaatagtttgaattatccagcagttttgtatttcggtaaaattagcgcggttccactgtggctttattgtttgttgtatttagtctatgcagttgtactagtgatgtttgtgactagcctggcattgttgcttaatcaattaactcatagcgtttatctaacgatttttattgcggcattggtctacagtatttcacttttaccgggtagcattgctaaatatcttttctttttaccttcagcttatctaaatatcagtaaggttttagatgggactgttgcaagtcaatcaattattccggcaaattgggcagttggtatgactattttactagtgtgggctgtagtgctggtaatctggttcaggcatttggttaaccaaggtggtgttgaaaaatgaaaaggcaatattttttatttcaattaaaaatatttttgactaatcctaaaaatgtggggctgtttttcattaccgtcgtgcttgcactttactttggtttagtcagcgcaccgcagcatcatgtgattgaagatgttgatccatatgcaatttcaaaagaatatcaagatgatcaagcctttttaaaggtggctgaaaaagaatttgcacgggcagataaaggtacttcggattatgatcccagtgaaggtgctaaagatgctgttaccacatatccgaccatcattaagtatgaccatgagcgtttaaaagcacttaagaatcatgattggcgtttgtataccaaatacagtagcaagtggtatcagaaaatggataatttgatttgggttaaagaaaatcagaattacatgtatcccttggaatactaccacaataataattacaaagaagatggacattttgggtatcaaagaacatttcacttctatgatggtttacttaaaagtaaagcaaaattagacaaaaatgttttagaagaacggactactttacagagattacagcagtcgctttctgggtggacgatgattattttaattgtgattgttgttttgtttgcggcagatatgataaccaatgatcaaaaataccgtacagtagtgaagaatattcctctttctaaaaggacaattctttggctaaaaactgcggttattgaagtgggaattttatttaactttctagttgcttttttagtcgttacgttgtgtactgcgccaaggtatggttttggctcctttaatttattaacgccaatttatactggtcgtctgtatttcaaaacgccctttgtttatcagacgctgggacaatattatcttggtttcttgatctttgcagttgtaattacctttattttcattagattgactttattattgtcgctgatttttagaaatgaatatgtagcggctattatttcaagtgttttggcaatgagtgctaaagttctttatttttcattgggtatgggctttgtttatccatttttgaaacacttaccaatgacatattttacaatcggcgaaagtttgactagtaatttatcgtatttaatggactcaccaggttgggactttaatgatgggattattccgttagttacattagcaattgtaattgaattaactatttggctattttgtcagtttagaaaagtagtattagtgaagtaggtgaaaacatgttaaaaattcataatgttaaattagcttttggcgaacatgttgtcttagatgaaattagtttaaattttcaaataggaactatcgtaggtttagttgcaccaaatggtacaggaaaatccacactactaaacgtaattttacataatcttgagccacaagctggttatgtagaatatgatcatttacgttatcgcagcaatcgtgagattattaaactgcatcgactgatttgtgcttttcctgatcaaagtgatctgtttccatttatgagcggtagggatcatttaaagctttatgcggatctttggaaaaattcggataaaaatgtagataatattattaataaattacagatggaaaaatatgttgatcgcccaacacaaacttattctttggggatgaaacaacggctttgttttgccatggtggttgcagctgatacgccagtaatgcttttagatgaggtgatgaacggacttgatccccaaaacgtacaattgatttcagattacttattagatctaaaaaaagaaaataaattgattattatggcttcacatttgttaaataatctacaatcttacgcagatcgtgtacttttcttgaaggcaggaaaggtaattgaagatctcgataatcaacatcaggctaagcagtatctgaaaattgaggcgaatgcaatagccgggacgcggttaaaagataaaagatttactaagttacctgataataaaattattgtgccactggatgataatctaggattagatcaacttatacttaaattgactaaagagaagattccatattcagttggtcgaattgatttggcagaattatttagtaaattttatggctaaggcaatttgattagataaaaatagctcagttcgggtcattcgtatgatttgaactgagttactttttacttattttgcagtagtttttgcaggtcgttctgtacttgcaaaagcaatattattttctcgtaaaatttgaatatattgggtcaaatacaaatttttcacagcagattgtttaccaggcttaacttgaaaatgaatggaataaacaaattttttccctgtttgttcggtcacaccgacaatagtaggacctgatacaattgtctttttctcaggctggatcttacgattgcattctttgattaacttgttaacttcatcaatatcgtttttggtatcaagatccaaattaatgtctagtgctacaccgccatgggctaggttttgcacaatggtaatgttgcggttagggatgaaaataattgagccatctgaacccttgagacgagtagttctgaggcctagttgcacgacggtaccaacattagtgccaatctgaactaaatctccaacatcaaattggtcttcacttagaataaagaaaccgttgaccaaatcactaacaaagccttgtgcgcccattcctaaagctagggaaaaaattccagcactggctaacaaggtgccaactggtacacctagaatagagagaataccgaataaatagaagaagataagggtatattgaaaaacgctgttaatcaaagctgtgatagttcgagttcttttattcttaactgtgttatgcttggctaagtaattattaattattttatgaccaaaatgggataaaaggtaaaaaatgagtgaagtaatagctaattgccaaataattgacaataaattttggctaattttactccaatcaatttcaattttctgtatatttatgtgagtaggaatcttcatttggtgtcctttctattgcttacgggtataattaagaataacaagacattaattgagaataaaggatattcatgctaaactttttttagatgttgatggaggtagaaaatgacaatttcttatggtgctttagcaggcttaattgcggcgattgcattcttaattttagtattatttacgattccaatgctaattcggaccgcgaagttgttgaaagaaactagtgcaactattcaaacaactaacgagtcaatgaagaaaatttctgaagatatggatggcttgatggatcaaacttcggatttgttagataaaactaatgacctaatgaccgatgttaatggtaaaatgaagacgttagatccagttgttaaagctgctgcagatttaggcgaaagcgtatcagaattaaacgattcatctaaaaagatcgctaaacgctttagcagcaatcatttaagccgtacgggtcttatttcttcaatagctgcgacggcatttgcaagacgcaagcgtcgcagaggtgaaaattaataaaggaggaattcaccatgaaaaaattcgcaagtttcttattaggtgccgttgcaggatgtgcagcaggttttctcgcaggttcacttcttgttagtgatgaacaagttgatgacgttaagaacaagattaaagataatgacaagcttcaagatttgaagaagaaatacgataatggtactgaaatcgttaagaatcaattagcatcattccctaagaatgttgaagatgattcagaattgaaggattttgacgacatcgtaatcgatgactcaaataaagatgacgatgacagtgaaaatgctgaagagtcagttaacgatttgaacaatgctgaaaaagatgatactgatgcagcatctacttcagaaaaaccacaagcttaattaaagtcaaaaagaaaaggagctggtcgtgatgatcaatgtcattaagttaagacattgacaaattatcgacttggacttttaagatcattcatttgcgatttatcgcatttgaatgctcttttttcatgccaaataaacccaaatcttgtttagaaattaggctacacgatataaataatatacagctgatttgggtttgagatttcttttgtcttttcgtcctggtctgatcggaattgtgtaatgactaatttgaataagaatctttttaaagatttcagttgaagaagaaattatatacatagcctggatgacaaaacatgactgtttgaaattgatcgcatattgatacttgcattttttttgtggtacatatgcttgagcatcaatttgactgactgcgttaaacataatcatgtgggcatagatctccatttcaataaatctatcctgcttggaatgaaactgtacgctacctaaagcatatttcaactttttgaatgaagtttcaatgccccagcgcaaatggtagatttctttgatcctttttaagggataatcggctctatttagattagttagaacaacttcccattcttctttgcctgatttaggatcattaattctaaatttacaggcacgaaattttattgtacataactctccaaagtcccagctgccatctttggtatttttagaccgatattttatatattgacggtaatgatggttaaccaaatgaacgttttctgtagccttatgggtttcataataataattagaggtagtcacccagcaagctatatccttatcacactcttgattaggcaactcagctacttccttaaatgcgccatatcccgttttagtacgtatgacataataacagttaggcaggcgattacaattttcaatcatgttaaagccggtataacctcgatccatagtaactatatatggtccgcaatttagctttttaagcatttgaacggcggctttacgttcatccatctttgacttaggctgaaagatgcagtcttgataagtattatttaacaggtcatagagtgcattaacatgaatttggcaatatggctttcctttatgattgagatttccaacgatattctctgatttaggattccagatttgattaaaatcagacccatcaatggcaaatatacgatatttatgatcaaataactggatattaaataaattctgattaaatacagttagaatatgcttaaaacatgcgggtgaaagctgacctttgcgttggacataagcggaagtactgactactttatcgttatttttaatagctttttggccaaaagctctaaacaactcactggtcaaatcttttccttgcatattaatagtagttttaatgactgtagctgcatctaaaaaccgcttcctagtgaaggcatgaggatcatcgataaaatcatgaatatgctttccagtatcattgataatttgatcaagacgatctaaaatatttctgtgaagggctttcataattaacaccagctttctggcaataattttgaaggtttaataatttaatcagagggcgaaaaggtaggttcttttcgcctttattttatgcaaaaaaagaaccaaatcataatgattcggttctacagagattagattcaatttgtcaatgtcttaacttaatgacattgtcgtgatgatcagctccttttttatgactaaaattagtctttaagtggtaaaacttttaagtctttgtcagtgtgagtaaaggtttcaaagccgtccttagtaacgacaccacaatcttcaattctgacaccagcaaagccagggatgtagatacctggttcaatggagaagcacattccttcttcaagaactaagtcgttaccttgtacgattgatggatattcatgaacgtttttaccaatgccgtgacctaggcggtgaatgaagtattcaccatagccagccttagtaatgatgtcacgagccacgctatctaattcttcagcggtgattcctggcttagcagcttcgattgcggcttgttgagcttcacgatcaacttcataaatttcgcattgcttagcagtaggttcaccgtaagcaacagttcgactagaatctgatgcgtaaccatcgtgcatggtacctaagtcgaataaaactaattcatttggttgaacagtgttcatagttggaccaaggtgaggattagcggcgtttttaccagcttgtacgatggtttcaaaactttcatgcataacacctttttgaatttttagttggtaatcaatttgaccagcgatgcttctttcggtgacgccagttctaattgcgtcaaagccaatcttaaaagcgaagtctgcttctgcaccagcgccttgcaacttcttgatttcttcaggtgtcttgtaaagacgaattttttcaataaaaggtgaaacatcattagtaaaactagcgttaggaaattcaccacgtaagagttggtagtgggcaacagacaaatcatctttttcaattgcccaattatgggtatcgtgagttctctttttgacattagttgcgatgatgctccaaggattctcggaatcaagatagccgataacatcgccatcccatgcagatgcttttgcttcttctacgtttaaagctgggcagaaaataaatggttccgcatcttttaaaacaattaaagcaaagattctctcatgtggttccattgagtaaccagtaaagtaggaaatggtgattggattagaaatgtaagcaagatcattattggagtcttgcaaccattgttgtaatttatctaagttcatattgtcctcttttcttgcaaattatgtttactgtagtatatcatgatctcttaatgaaaaaatgaaagaaaagctgtaaacgtttgcattttatgcagcatcgtgatatctttaagtgaaggattttttggaaggactgagagataagagatgcataaacaagaagttacaatctatgacgtcgctcgggaagctaaggtttcaatggctacggtttctcgtgttgtgaatggtaatagtaatgttagaaaagagacacgtgaccgtgttctcgaagttattaaaagactgcactatcaaccaaacgctgtagctcaaggtttagcttctaagcggactactacagtagggttaattgtcccagatttaactaatttatactttgcagaattatctaagggtattgatgatattgcacttttatataaatacaacatcattattactagtattgaaaaccgcttgatgaaggaagaccaagttattcaaagtttgctgaataagcaagttgacggtgtaatttatatgtctaaccgtttatcagatgcagcagctgatgcctttaagcggactgatactcctgtggttttagcaggtactaaagacaatcgtgatgattttgcttctgtcacaattgactataagaaggctgatactgaagcattaaatttgatgtaccatgatggtaagaagcatttgggaatcgtagttggtgatcaagatgctgtagttaacagcgaaaacagaatccctgcttatgaagaattcatggaagaaaatgatttgggcactcctcgaatctatactgatattaaagactattcagatggttataatttatacccacaattagttaaagatggcgttgatggtgtaattgttactcgcgatatttcatcagttggtattttgaattctgcgatggatgcaggtaagaaagtgccagaagatttggaaatcgtgaccgccagtgctacgcagttagcttctgttgttcgtccagctttgactacgattaagcagccactttatgatatgggtgccgtagcaatgagaatgttgactaagttgatgaacaatgaagaagtagatgatactcatattgttttgccatatgaattagttaaaaagcaaagtactttaaatcaataattaagtgaagcaaaaaagaccagtttactggtctttttgttttagtagataattttgttaatctgttgaagcttttgtgtaaaagtggttggtgcaattgcttgattaggattatagggcaaaagcacgagattagtgtactgactgacccgtggtaaggactgataatctctgaaatcgtcttgactaaagaagccatagaacaagatatcttttgccttaacccaacctagtttggtataaatccacatgtttttaggactaccattaaaattttgaatttttaataattgatttgcgggtaatttttgctgcgttttggcttggttatcaggataacgataaattgtaactttttggttaggtttagcgataattttcttattttgataaggagcaatatctcgctttgttaagtcaaaattaacgaattctgccgaaataaaagttttttcagcaatttgataaaataagcgatcatctacacggacgccataagtgacattgactttttgacctggttgcacgtacttcttttctttgatgcgaacatacggattcatcattgtagcggctttagttttaccaaaataaattccagttctattaatagcgtactttttagtgccacttttggctaatttatatttaaaaccagtagcgggatagttggtaaccacgccatcaacattccgattaattagccaatgccatagggcaggcgattcgtccatttcggcccagacaaacagttgcttatgtaatttgtgaagccagtgaattaaaaagggatgctcttgcacaatgtcagaagaagcattgatagcattaacttgaggtaaattactgaaattaatgcgtttcaggctaccaacgatcaaaattagataagcttcaggcataatttttctaaagtgaaagagactagcagcggaaaatgaatgaatcatgattcttttctgcatatggtattttttaactatttgtgcgattttatcctctaactcataggacggatttaatccatgatcaattttagtctctaagacaaatttagtgtttggtttattttgataatgcttaaaaagctcactgagtgacataacgtgttcgccattgtcatattgcagttgtttaagtgctgtaaaattattttgtgatacaattgcatgtgtatgagtaactcggaagaggtcatcatcatgtgcaatgaccggaactccatcctttgagagctggagatcgagttcaacgtaatcagcaccagaattaaaggcggaatcgtcagcctgaattgtttcttcaggatatttgatgggatcaccacggtgccctacaactgtaaaaccactatttatgaaaaagactaagctaaaaaaaagaacccaaacgagtcggcttttaaatttcatgtgtacacctctatcgcatacttaacaatagcatggttacacatttttttctatttatagtactattcttttatcagtaatcggtatgattgaaatctaaaggatgagatttaatggaacaattggacttaattgaagaagttaccagaaatgatggcagtcgatattatgaaatctctaatattgaccaaaatggaattgcagaattagctgcagatcatggcttaattaaaaaagtcaaaatactgcagctgaatattcctcgaactaaggcactgattgcttatgaaaaatatatcaatgatacttatgacttgcagactttgactaatgaaagtgattggaaaaatccaaaatgggtagaatgggataaacctaagggaaaaattttagacgcatataatatgatcttaaaagccaatcgaattggttagaaagtggcataaaaaatggaacaactgcgaattttacataccaatgatcttcattcacattttgaacatttccctaaaatcggacgttacttgaaaaaagcgcaggctgatcaatcggttgatggtatctacacttttgatgcaggagactttatggatcggtctcatcctttaactgatgctacggaaggtcaagccaacatcaaattgatgaatgggtttaactatgatgcaattacgattggcaataatgagggaatttctaatccacattgggtattggaacatttatttgatcatgcggactttccgacagttttagcaaatttgcgtgaagaagatgaatcaatgcctaaatgggcagtcggccatatgtttttaactactaagaaaaagacgcgaattgctttaattggcctgactgcagcttatccaatgacttatggtcctaatcattggcatgtcaagatgttaggtgacagtatggatcacgaattagctcaaattgaaggaaagtatgatgtcttaattttattgactcatgttggattaaaaatggatcgctggttagctaaacattatcctcaaattaatttaattgtaggaggccacagccatgatctgattgaacatggtgaaaaagtggggcatacttggattacgcaaacaggtaaatggggaaactatgtgggtgatattcatctagaacttgaagatcatcacgtgattaaggtagtacctcgcactatttctactgcttcgatgccagaagaaccggaagataaggcagtgattcagggctactatgatgaaggtaagcgacttttatcagaacgaaaagtggctaatttacctgaaaaatttgcggatgataaagtagcagccgttcaagtttctcttgatgcgattgctgattttgctaaaacagatttagccattttaagctcaggcctattcttgcccccgtttaagagtggaataattactcaatatgatttacaaaatgccttaccgcatccaatgcacgttgttcgttcaaccttgaaaggttatgatttgtggcgactagtgatggaaattgaaaagaatcggcattacctagaccattttccactgcaagggatgagttttcgaggaaaaatttttggtcagatgtattacaaagggatcaaggttgatatgcgtagacgtgtagtttacgtcaatgggcatgaaattgatccacaaaaagaatataaaattgcctgtttggatcattatgtcttagttccattttttccaactttggctattgtcggtgaaaatgagtttttattcccacaatttttacgtgaagttgttggtaaatatttggctgaaaaatatcctttaacagcgagaagtgaaaaagatgactgaagaaaataaatttgaacaagaacagccaattagacacccacttgctgacgtggtgcaagatggtaagagcattaagattggtgcgcagctttatagcatcattgtcaatgagcgagacgcacttgatttagaatctttgcgtaaaaaatatgatccttatcttgaccagtatgattatctggtgggggacgtttctagtgaacatttacgcttgaaaggcttttataaagacggtgctagaaccgcaattgataaaaaagaaatggcgatcgtggattatttaacggaatattgtaatcccggcggaccttattttatcttggaattaacgcatccagtacattattatcagcatcaacgtactaaaatacggcgatcacgtgaacgacgcgagcgcgattttggtaaaaatgagcgttatcatgcacgacgtcgaaattatcggaagaataaaaatgaaaataatccgtttaagaagcggcgtgttcatcaaactaaatttaagaaaaaaacaatcaattgcagtgaaaaaagaatttggacggcatcattcatttattattaaaaagagaaagggaaactagtgaaagattaccgggtatttttaattgacttagacggaactgtttatcgtggtaaggaaacagttgaatcaggagtaagatttgttcatcgtttggttcaagcagggaaagactatttgtttttaaccaacaatacgaccagaacaccgcaaatggtagttgataaactaaagggacacggtatcgaaactgatacggaccatgtttatacgccaagtatggccacagctagctatattttacaaagagaacacaaggaaaagatcggcttgtatattattgggcagattggtctctggcatgaattattgcaacatccagagtttgagcttaatgaagaaaatcccgattatgtaattgtcggtatggatacagatctgacttatcataaagtacgagtagcttcacgggcgattagacgtggagccacttttattgggactaatgccgatatgaatttaccagcagaggatgagctaattccaggcaatggttcacaatgtgcattcgttgctgcagcaagtggagtagagccactgtatattggtaagcctgaatcaattattgtaaaaatggctttggataaagttggctatagcaaagatgaggcacttttggtaggtgataattacgataccgatattaaagctggctttaatagtggagtagatcagttgttgactttgacaggtgtgacgaccaaagtggatattgcagataaacgtcaaccaacaattttagttaataacctagatgaatttgaattatgattactaaaaacaatattttttcgctgatttatcattttttgtttgctgtttctagcagtgtaattggggcaattgtggctagttggccattattgtttatttttatgatcgtacaaaagacatatgagacggttcacatgtctttgtttaaggtaatgcataattataaccagctgatgttttatttgctctggccctttaaaaagcagcttaaaatggataatttccctacatctgctaatgcggcagaacattttgcggaatgtaagcatttatttattctgactctattagtttttattatctgcatcatagtgcactttgtttttaaacgacaaaagaaaaagctactgcttaatttggataaatcagtagcccttattttgctattattgccaattattatttttccatttgcagtaaccaatttcgacagtttctttgtgatttttcaccatattttgtttaacaatagtgattggctgtttgatcctaatactgacccaattatcaatgtgctaacggaaggcttctttgcttcttgttttgccgttgctggggttatttatgaattatattttgctgaaaaattattacgtaagtaaaaaagagttccttagtggaactcttttttgagtgatatttttttcttgattgcgacaattgcgattggcacaactgatactaaaatgatagcaattacgatcattgaaaaatggtcctttacaaatggaatattgccaaagaagaaaccgatgattgtgaacaatcctgtccaaagcaagccacccaagatgttgtaggtgataaatttaccataatgcatcttactgccgccggaaatgaatgggacaaaagtacgaataaatggtataaatctacctataacgatcgtaattggtccgtggcgctcaaagaacttttcagcggccaaccgattattttgattaattaatttattgaaccagctatgtttttcaccagctctggttgaccaggcaccaatttcatagttgatactgtcaccgattatggcggcgaatgctactataagataaactagccaaatatttaagccatacttaggattagcagccattgcactcgcagcaaaaatcaacgaatcgcctggaagaaatggaaaaacgactaagcctgtttcaataaaaatgatagcgaataagattaaataggaccaaccaccgaattggttaacaatcgggattaaatggtcatcaatgtgcaaaataaaatcgattaaactcatctggaactcctaaaaactagttgaatgaattgtcaaagttttttcagggaaaagatcacgcataatcgcggtgattgcaatctgggcttcgccaaaaccgagagcgattaaagggacgcgtccaagataggtaacaacatcgccagctgcataaacaccggcgatattagtttgcattgttgaattcaccttaatttgtgcgccagctaaatcgattccccattttttgacaaagcgattattagctttaaagccatatgcaacgactgcttggtctaacttgatattagttaagctatcttttcccatttcttttaaattaacgttcagttgattatcaaccaaattgatttgtttaggaagataaggagttaaaatttcaacattttttaaagacttaagttttttgacattagattcaagaccgcgaaattgattacggcgatgaatgattttgacattggcataattagctaattctagtgccaggtctaatgctgaatcgccgccaccaaagacgccaactgtttgtccgacaaattttgggggatctttaataaagtaatgaatccttttttgagtatcatcatccatagataatggtaaagctttaggtttaaaggcaccggcaccagtggtaatcaatatgctgcgggatgcaactatatcatcgataataaagccgtctttttgtttagtgacattttcaactttatggttagtaaaaatagttgtatccgttaaattatgtcgtaaattgtcgattagttcagttcctgtaatagagtcgtaagcaggaatatctttgattttcttaaaaggataaagcatttgtggctgtccgcctgtttcagataatgaatcaaacagtacggtcttgagtccatgaagatgggcaaatcgcgcggcaaataggccaacaggtccgccaccgataatagttaaatcaaattttttaattttaatgacctcctcaaagtagtgatgtatcaactttaacatgaattttgtaaatattcatttaaaaataagcttgtcaaaaaatgaattttaaggtatattattgaagtcgcctttttaagagcgagcataattctttattgaaaaaatacttgcaattaatattcaagtattatacattaataaagtcgcttcgagagatgcgacgagagcttaaaaacagacatgcaaggaaagaaaacaaataaaaagaaaaaagtacttgcaaagaagtaaataagctggtaatatatttaaatgtcgtcaggtgaaagcagaaaaagcttgagcaagacaaaaaaacaaatcaaaaaagttcttgacaaagaaatgatggtttgataaaatatgaaagctgtctgctttgcaaaaaagcaagacagaggtagtactttgaaaactgaacaaagtttcgctaaaagtgtgcgggtgtaaaaacccaaacaagaagcgaagtcaattcgcgagcaataaatttgagacaaagatcttaaataaggaatgagcaatcattcaaactttttaaaatgagagtttgatcctggctcaggacgaacgctggcggcgtgcctaatacatgcaagtcgagcgagcggaactaacagatttacttcggtaatgacgttaggaaagcgagcggcggatgggtgagtaacacgtggggaacctgccccatagtctgggataccacttggaaacaggtgctaataccggataagaaagcagatcgcatgatcagcttttaaaaggcggcgtaagctgtcgctatgggatggccccgcggtgcattagctagttggtaaggtaaaggcttaccaaggcgatgatgcatagccgagttgagagactgatcggccacattgggactgagacacggcccaaactcctacgggaggcagcagtagggaatcttccacaatggacgcaagtctgatggagcaacgccgcgtgagtgaagaaggttttcggatcgtaaagctctgttgttggtgaagaaggatagaggtagtaactggcctttatttgacggtaatcaaccagaaagtcacggctaactacgtgccagcagccgcggtaatacgtaggtggcaagcgttgtccggatttattgggcgtaaagcgagcgcaggcggaagaataagtctgatgtgaaagccctcggcttaaccgaggaactgcatcggaaactgtttttcttgagtgcagaagaggagagtggaactccatgtgtagcggtggaatgcgtagatatatggaagaacaccagtggcgaaggcggctctctggtctgcaactgacgctgaggctcgaaagcatgggtagcgaacaggattagataccctggtagtccatgccgtaaacgatgagtgctaagtgttgggaggtttccgcctctcagtgctgcagctaacgcattaagcactccgcctggggagtacgaccgcaaggttgaaactcaaaggaattgacgggggcccgcacaagcggtggagcatgtggtttaattcgaagcaacgcgaagaaccttaccaggtcttgacatctagtgccatttgtagagatacaaagttcccttcggggacgctaagacaggtggtgcatggctgtcgtcagctcgtgtcgtgagatgttgggttaagtcccgcaacgagcgcaacccttgttattagttgccagcattaagttgggcactctaatgagactgccggtgacaaaccggaggaaggtggggatgacgtcaagtcatcatgccccttatgacctgggctacacacgtgctacaatgggcagtacaacgagaagcgagcctgcgaaggcaagcgaatctctgaaagctgttctcagttcggactgcagtctgcaactcgactgcacgaagctggaatcgctagtaatcgcggatcagcacgccgcggtgaatacgttcccgggccttgtacacaccgcccgtcacaccatgggagtctgcaatgcccaaagccggtggcctaaccttcgggaaggagccgtctaaggcagggcagatgactggggtgaagtcgtaacaaggtagccgtaggagaacctgcggctggatcacctcctttctaaggaagcgaaggatatggagagcaggaatgctaagagaagtatccagagcaagcggaagcacactgagaaactttgtttagttttgagggtagtacctcaaagatttgaaaaacgccaagcgttagtcgggcctatagctcagctggtttagagcgcacgcctgataagcgtgaggtcgatggttcaagtccatttaggcccattgacataacgaagaaaaagagttaaagttatgtctggccgaaaataaaatactctgggggcttagctcagttgggagagcacctgctttgcacgcaggaggtcatcggttcgaacccgttagcctccattgatccagaaaaaggatcaaagagctagtacattgaaaactgaatataatccaagcaaaaaaccgagacaatcaaagagaacagattgtagagcgaccgagaagagaattcttgagtaaggtcaagtagaaaagggcgcacggtgaatgcctaggcactaacagccgaagaaggacgtgacgaactacgaaaagcttcggggagcggtaagtacgcagtgatccggagatatccgaatgggggaacccaatgcagagatgcattattgattagtgaatagatagctaatcaaaggaagacgcagtgaactgaaacatctaagtagctgcaggaagagaaagaaagatcgatttccttagtagcggcgagcgaagaggaaagagcccaaaccaagtgatttatcatttggggttgtaggactgcgacgtggcagtgtaagagatagttgaattatctgggaaggtaagccagagagggtgagagccccgtaagcgaaatctcaagcacgcctagcagaatcctgagtaggccgggacacgaggaatcccggttgaaaccgcgaggaccatctcgcaaggctaaatactagttagtgaccgatagtgaaccagtaccgtgagggaaaggtgaaaagaaccccggaaggggagtgaaaaagaacctgaaaccgtgtgtctacaagtagtcaaagcacattaaagtgcaatggcgtgccttttgtagaatgaaccggcgagttacgttatctagcgaggttaagtcagaaaagacggagccggagcgaaagcgagtcttaatagggcgaaaagttaggtgacgtagacccgaaaccaagtgacctacccatgaccaggctgaaggtgtggtaaaacgcactggagggccgaacccacgtaagttaaaaattgcggggatgagttgtgggtagcggtgaaattccaaacgaacttggagatagctggttctctccgaaatagctttagggctagcctcgtggagaggataatggaggtagagctctgtttggactaggggcccgtcaggggttactgaatccagataaactacgaattccagatatccatacacgggagtcagactgcgagtgataagatccgtagtcgaaagggaaacagcccagatcaccagttaaggtccccaaatctatgctaagtggaaaaggatgtggagttgcgtagacaactaggacgttggctcagaagcagccatcattcaaagagtgcgtaatagctcactagtcgagtggcgctgcgccgaaaatttaccggggctaagcatagtaccgaaactgtggatgtgttttaaagagcacgtggtaggagagcgttctaagagcggagaagttgaatcgagaggatcaatggagcgcttagaagtgagaatgccggtatgagtagcgaaagataggtgagaatcctatccgccgaaagactaaggtttcctggggcaggctcgtccgcccagggtaagtcgggacctaaggcaaggccgagaggcgtagtcgatggataacaggtagagattcctgtactgtgtcaaatcgttaagagcgaaggagggacgcaggaggtgaagcacgcatcgcgatggaacgatgttcaagcaacaagtgcggttaagagtcaaatgcttctaaccagcaacacgagttgtgaagaggagtgaattaaaagtagcgaaggtgtggtaatcacactgccaagaaaagcttctagccagagatgacatacccgtaccgcaaaccgacacaggtagtcgagtggagaacactaaggtgagcgagagaactctcgttaaggaactcggcaaaatgaccccgtaacttcggaagaaggggtgctagccaagagattggttagccgcagtgaataggcccaaacaactgtttatcaaaaacacaggtctctgcaaaatcgtaagatgacgtatagaggctgacacctgcccggtgctggaaggttaagaggagagcttagcgtaagcgaaggtttgaattgaagccccagtaaacggcggccgtaactataacggtcctaaggtagcgaaattccttgtcgggtaagttccgacctgcacgaaaggtgtaatgatttgggcactgtctcaacgagagactcggtgaaattataatacccgtgaagatgcgggttacccgcgacaggacggaaagaccccatggagcttcactgtagcttgatattgagtatcttttaaacatgtacaggataggtaggagccagagaagataggacgctagtcttattggaggcaatgttgggatactacccttgtttgaaggatgctctaacctcgacctgtaagccaggccagggacagtgtcaggtgggcagtttgactggggcggtcgcctcctaaagtgtaacggaggcgctcaaaggttccctcagaatggttggaaatcattcgcagagtgtaaaggtataagggagcttgactgcgagagagacaactcgagcaggtaggaaactaggacttagtgatctggtggtaccgtatggaagggccatcactcaacggataaaagctaccctggggataacaggcttatctcccccaagagttcacatcgacggggaggtttggcacctcgatgtcggctcgtcgcatcctggggctgaagtcggtcccaagggttgggctgttcgcccattaaagcggcacgcgagctgggttcagaacgtcgtgagacagttcggtccctatccgtcgtgggcgtaggaaatttgagaggagctgtccttagtacgagaggaccgggatggacgcaccgctggtgtaccagttgttccgccaggagcatcgctgggtagctatgtgcggaagggataagcgctgaaagcatctaagtgcgaagcccccctcaagatgagatttcctttgcgtaagcagtaagacacctcagagacgatgaggtagataggctgggagtggaagtcctgtgaaggatggagcggaccagtactaatcagtcgaggacttgaccaaagcgaagcaaactggaaggttttttgcgagaaggattatgtttagttttgagtgtaaaagctcaaaagagtacggtggcgaaagcaagaaggatacacctgttcccatgccgaacacagaagttaagcttcttaacgccgaaagtagttggtgggcaactgcctgcgaggaaaggaagctgccgtgctcaatatggaggattagctcagctgggagagcatctgccttacaagcaggaggtcacaggttcgagccctgtatcctccatatcgagtcgttagctcagttggtagagcaacggacttttaatccgtgggtcgagggttcaagtccctcacggctcatgaccctatatatgcgggtgtggcggaattggcagacgcgctagatttaggttctagtgttttcggacgtgtgggttcaagtcccaccacccgtattgccaaccacatattgacaatatgccgatttagctcagttggtagagcatctgtcttgtaaacagggggtcgtacgttcaagtcgtataatcggcatttatattacgcggaagtagttcagtggtagaacatcaccttgccatggtgggggtcgcgggttcgaatcccgtcttccgctttcatcaacacgccggagtggcggaattggtagacgcacgggacttaaaatcccgcggttggtttcaaccgtatcggttcgactccgatccccggcattgatgatgcgcccttagcgcaactggatagagtgtctgactacgaatcagaaggttgaaggttcaaatccttcagggcgcatataacgggaaatggctcagtttggtagagcacctggtttgggaccagggggtcgcaggttcgaatcctgttttcccgattgtaatctaatggtgattggttacattttggcggtgtagctcagctggctagagcgtccggttcatacccgggaggtcgagggttcgatcccccccgccgctataattgtaagcttggacctttagctcagttggttagagcagacggctcataaccgtcctgtcgtaggttcgagtcctacaaggtccataatatggcttttatattaatatcgcgggatggagcagtctggtagctcgtcgggctcataacccgaaggtcgttggttcaaatccagctcccgcaatttggtccattggagcagtggtttatctcgcctccctgtcacggaggagatcatgggttcaaatcccatatggaccgtaagatggctcggtagctcagtcggtagagcaaaggattgaagctccttgtgtcggcggttcgattccgtcccgcgccatttcattttatattaggtgcgggtatagtttagtggtaaaacgaaagccttccaagctttagtcgcgagtccgattctcgttacccgctttatatgggcctatagctcagctggtttagagcgcacgcctgataagcgtgaggtcgatggttcaagtccatttaggcccattggagacatactcaagtggctgaagaggcgcccctgctaagggtgtagatcgggttattccggtgcgagggttcgaatctctctgtctccgctatatagaaaagtaactgttctagattaatttctagagcagtttttttgtgtaccgagcggcattcttagtccgatgaaagtgttagaactaagagccagtagcaatgatattatgagtatgggacgtttacaaaggagtaaatacctgctgaaacagtaaggaattacaaatgtatcgtcttatatgcaaccatatgtatagtggatggaaggagatgagttcgttaagttctctctgcattgaaaacacgtcataagatgttaaaaccttaattttgagttattgataaacctaaatgcatattattttgaatgacttaatggaaattattacacttcttttaggtaaaagtcttggacattgattcaagtcaataatcgtgtatataacatagggagagccgattgttttaaatttcttcttgtatgatctatattaaaaaaataattttgtgggggatttcatagtgatataaagaagcagtttaatatggaacaatttataaagatcatttagtcctgaattgtcaaattaagtgcaacagttaggttatgaagagatatattgcttgaagagttcctctgctgtgtgatattgaaggattcgacgatgtttgcggttaatggcatcagttgcctgttgaacataagcagctgacttatctttcatgcttttgcctttagggaagaattgacgcagaagtccattgcagttctcattggtgcctctttcccatggagaatatgggtgggcgaagtagatctggcagcctttgatctcggtcatatccgcaaactcagagccattgtcaaacgtgatcgatttaaaccaggcaggatgtctgtcaatctcattttgaagcagcctttggcatgtgcttgcccgatagtcaggaatcttgataactacttcaaagcgtgtggttctttcggtcaaagtcattaaagcaggctgattcttgcgtctgacgcctttaaccagatctccttcccagtgcagcggcgtttttctgtcttcaatctctttaggacgctgttcaatggaattgccaagatgcttcttgtgcaaagcatgaccgctatggccgtgatgacgcttgttcctgcgtcttttgagcttcataggcagatcaatattgcttatgtccagcaagccctgatcaatatagcgatagacagttggtgtgctgggacaagggtagcctggcatagtccttttgaattcaccaacgaattcatcgatgctggtggcatcaaatttagctttaaagcgtctggagagcattctcaaaaagacagcataatgcttcaatggattgcgctgatagcagtttttgcgacgcttctcataataaatctgtgcagtatcagcgtaatagtgctcatacaataaatagctgctgtctctttgcaggacacttccgcgtttgatttcgcgactgattgtcgacttatggcagccgacttcttgagcgataacagtacgggaagttatgccggaatccagcattgcttgaatttgtccacgttgtacgctggttaattgatgatagtgcttagaaatgctagaatttgaattggtcataaagatcttcctttcttgatttttcgtcacttcaagtttaggtcttcatggcctttttgtttaacacttagtgttgcacttcaattttaaatccgggaagatcatttagttaaagataagagaagctgttttgctctagctaatttgaagtattaagatagatataaatgttttacaacaaaaaaataaaaaagtacttgcattttgactgaatatctattaatattaaatacgttgtgattgagagatcacaatagtaatagctaattaaaaaaataaataaaaagttcttgacttttgaaatgtgattagttattataataaagtgctcttgagtgagttacatgacccgttggtcaagtggttaagacacggccctttcacggccgtaacatgggttcaaatcccgtacgggtcattgccacaatttatttttttggcattaagcaatggaggattacccaagtggcttaaggggacggttttgaaaaccgttaggcggttctgccgcgcgtgggttcaaatcccacatcctccttagttgaatatcgcgggatggagcagtctggtagctcgtcgggctcataacccgaaggtcgttggttcaaatccagctcccgcaatttggtccattggagcagtggtttatctcgcctccctgtcacggaggagatcatgggttcaaatcccatatggaccgtaagatggctcggtagctcagttggtagagcaaaggattgaagctccttgtgtcggcggttcgattccgtcccgcgccatcatctggaggagtagcgaagtggctaaacgcggcggtctgtaaaaccgctctctctgagttcggcggttcgaatccaccctcctccataatagggatatcgtataaaggtagtacatcggtctccaaaaccgctagtgtgggttcaattcctactatccctgtttaccttcatggcggaattggtgaaggggttaacacactggtttgtggatccagcatgcgtgggttcgattcccacattccgccctagtattgggatatagccaagtggtaaggcattagactttgactctaacatgcgctggttcgaatccagctatcccaattctaaataatttcataacttatggcggtgtagccaagtggtaaggcagaggtctgcaaaaccttaatcgtcggttcaaatccgacctccgccttatcaaccgaataagttgattattttaaaatttaatattatggcggtgtggcggaattggcagacgcgtcagactcaaaatctggtgtccattacggacgtatcggttcgaccccgatcaccgctattattatgaagcgatccaattattggatcgctttttttttattttaaaatgttagcattttattatataaattgcacatgaatacaggaatctttataatgctacatatggaggtactcaaatgaatattggtctttataccgatacatattttccccagataagtggcgtagctacttcaattaaaacgttaaaagaagcgttggaaaagcaggggcataatgtatttatttttactactactgatccgaacgtgaaaaaaggaactgtagaaccgaatgtatttcgttttagcagtattccttttgtctcatttaccgatcggcgaatagcatttagaggactatttgaagcaaccaaagtagctaaagaagtcaatcttgatatagttcatactcaaactgaatttgcattaggtactattggcaaatatgtagctcatcaattagatattcctgctatccacacttaccatacgatgtatgaagattacttgcactatattttaaatgggcatttgcttcgtccatatcatgttagacaatttgttaaaagctatttgaaaaatatggatggatgtattgctcctagtggccgagttgaagaattattacggcgctatggcgttcaaataccaattagggtgattcctactggagtagatttgcagggcatgaacaacgatattcaacgtgatgtgcggcaagaacttggaattgatcaagatgcgcctgtaattttaaccttaagtagaattgcagccgaaaaaaagattaatcatattttgaacgtaatgcctgaaattattgatgaatttcctaatgtgaaatttgttatcgcaggtgatggccctgatgttgatgtgttaaaggatcaggtagagcgattaacactagagaattacgttatttttgtcggtaatgtagagcatggcgatgttggtaattattatcgaatggctgatctttttgtttcagctagtgatacagaaacacaggggttgacttatattgaggctctagctgcaggtacgccatgtgtggtttatgacacagactataccgaaaacatttttgatcaagatatttttgggcagacatttactacacaacaagaaatgttagaagagattattactttgcttaagcaagggacgaaaagaatcccgcaggaacttttgcaaaataaattacagaagatttcagctgatcaatttgctaaaaatgtgtctgatttttatcagtatgcaattgatcactatcaacctaagcatgatgaggagactaaaaagaggaactaaatgattagaattaatatgttctcgcaagctgattctgttaaaggacagggtgtaggttcagcttataatgaattgattaaacttctgaggacgcacttagtagacgaattttatgtaacgattaacaaatatggcaatagcgatttaacgcattatcacacgattaatccaacctattacgcaaatagttttttaccagcacgtggcaggaagattggctatgttcactttttaccagatacattagaaggctcaattaagttgccaggcgtagctaaaaaagttttttatcaatatgtaattgatttttataaacgcatggatcaaattgttgtagttaatccaatctttattgataagttggttaactatggaattgatcggaacaaggttagatatattcctaattttgtttcaaaaacagaattttatgaagaatcattggccagcaaaaacgcatttcgtcatgaattaggaattccacttgataaatttgttgtttttggtgatggtcaagtacaggaacgcaaggggatcgatgactttgttaagatggcacaagctaatcctgatattcaatttatctgggcaggcggtttttcgtttggcaaaattactgatggctatgatcattacaaagaaatggttgacaatccacttaagaatatgacgtttgcgggaattgtagagcgagagaagttagttaagtatttaaatattgcagacttatttgttcttccatcatatgatgaattgttcccaatgtcagttttggaagcattcagttgtggaacaccagtattattgcgtgaccttgatctttataaggcaattatcgatggctattatctaagcggaaaagattttggcgaaatgaatcaagtattgcaaaaagtagttgccaatccacaaactttgcagaaatacagcgaattatcgcgtaaggcaagtcaacagtattcagaagatcatttagctaaaatttgggacgaattttatcatgagcaatatgaattaggaaaagagctaggtcaaatacattaatgaataaaaaacatttgtggggcattctggttgttttagcaatcagtgcctttgtgctatatgcagatttaaaagctacaccgatatcggaaatattacgggcagctcatggcctgaatatttttggattaatcatggtttttgctttaatgcttttgtcctatgtatgtgaagccggtatcttagctactttagctcatcgaaagaaagagcctaaaaggtcagcttggtcgtttttgcgaattccaattattcaagctctatttaatgcaattacaccaatgtccacgggtggacaaccatcacagctagccgcaatgattcaaatgggcatggaaggtggccgttccacctcaattttgctgatgaaatttattatttatcagatcgttgttttgtttgcctatgtatttacaattatttttggctttcatatggtaatgactaagttcgctggtttagcaatttttattgcaattggctttttgattcatgttagttcaattatctttttgcttgcaattatgtttgcttatcgttttactaaaaaggcaactaattggttaatggacttgttggcaaaaatgatgaaaaaggaacgagttgagaagtggcgtaaggctactttagaaaagattgatactttttatgcagagagtcagaaactaaaaaaagaaaagaagaaattatttgttgcctcgcttttaacagtattgcagctacttttcttttactccgttccatttatggtattaacagcgctaaatgtaccttgttcttggtatcaagttacgcaaatgaatataatgattatcatgtttatggcgatcattcctattccaggtgcgtcaggaggggcagaatatagtttccaaacgttattctccaccttcatttcttcacatggtgcgttaattttggctatgtttatttggcgcttttcaacatattttttcggtatgcttctcggcatcttaggctggatttttaagccgaaaaagataaaaagcacaaaaatgattaatttttattaaaacaacggtgtcttactaaatttcgtagtaagataaattaccgtaatgagaggagcagaagcgcgtggaacacactaaatctttttttaggtggctgacacagactaagttaggcttttttacgattgttttagtcttgttttggcttaaaacttattttatctatttaactaagtttaatttaggagcagttggtccaatgcagcaatttttattgctgattaatccgattccttcagggatgcttttgctgggaattgggctattttttaaaggacgtaaatcctattggattattttagttatcgattttttgctaacactgtggttatttgccaatattttatattatcgcgaattttcaaactttttgtcattttcaattattaagacatcaggctcgacttccgataatttgggtaaaagtattgcaggaattacactagctagcgattttttagcttttgctgatattgctgtaattatcgtgttattggcgaccaaagtaattaagatggatgttcgtccactgaagctaaaagttaatttgttaattgaggctttggctgtcagcttaatgggactgaatttattgatggcccaaaatgatcgttctggacttttgacgagaacttttgataataattacatcgtcaaatatctgggaatcaatgaatacgctatttatgatggctataagacagcacaaactagtgcacagatggccaaagctaatgtttctgatttgaagtctgttagaaactatttaaaagaaaattacgttaaacctaatcccgcttacaccggcgtggctaaaggaaaaaatgtgttaatcatccatttggaaagttttcaacaatttctgattggctacaaatggaaaggtaaagaggtaacgccaaatctgaataagatttatcatcaaaaagagaccattagttttgataatttctttaatcaagtaggacaaggcaagacttctgatgccgaaatgatgcttgaaaattctttatacggactacaatcaggtagtgcaatgtctacgtatggtacttctaatacttttgaaagtgctccagccattttgcatcaacaagctggttatactactgctgtaatgcatggtggtgctggctccttctggaatagaaataatgcttataagtcatttggctaccaatactttatgccactgtctttctatcagaacaaaccaagctactatatcggatatggcttaaaagataaaattttctttgatcagtcaatcaagtacattgagcgtttaccacaaccattttatttaaagatgattactgtaacgaaccactatccgtataatatcgataaaaagaatcagacgattgataaaacgaatactggggatgaaacagttgatggttatgtgcagaccgcgcattatttagaccaagcaattggtgaatttatgcgttggatgaagaagacgggcctagataagaagacactagtagtattttatggtgatcactatgggatttcaggtaatcaccataaggctagtgcagaattgcttaagaaagattcgtttaatgactttgataatttgcagttccagcgagttcctttgatgttccatatgaaaggactaaagggtggcattaatcacacctacggcggtgaaatcgatgttttaccaaccttactgaacttgctggggatcaaagacaaagatacgatccaatttggctatgacttgctaagcaaaaatgcaccgcaaattgtagcacaaagaaatggtgactttatcactccggaatattctaaggtgggtagcgattattatgacaccaagacgggcgaaaggatcaaacctaataagaaattaaaagaaaaattaactgcaatttctaacaccgtaactacacagctgtctttgtcagatcgtgtaattaatggcaatctgctccgattctataaaccaaaagggtttactagagtcaagccgaaggattacgactataacaaggcgccatctttaaaacgtttgtttgatgatccaagcaaaacttcactgtggtatcaaaatcatcgtaaaacgacgcaaaaagatttcaagacagatgcgcctgaactaaaaaaataactgcaaaaactagtaatttgtgataaacttggtaagtaaatcgtatgtgtgtattggaggcagcgcattgtataatttagttatgacgctactaatcattgtttcaatcttaattgtcattgcaacaatgatgcagccacaaaaacaacaagatgcattgaacgccttatctggcggtgccgtttttagtgggcaaaccaaaaaacgtggttttgaagcatttatggaaaaagtaacctcagttttattggtactctttttcgtctttgctattatcttagcttatatgtcttcaaaataaattttgtacctcccgatcaaaatatgatggggaggctttttttattaaatttaaagatcggagaataactgcatggcacaaaacgaaaaaattttggccggcgttttagaaatttttcgccataatccacaaaaacaatttcgtgtagatcaaattgaacgtgaagcacgtcgtgatagattaggtaattttactgaattaattaaggctctttcttttttagagcacgataaaaagattattacagatggcaaaggacaataccaattagctcaagaaaatactgaagttgaaggtgaatttagagctaatgataaaggctttggctttgttagattagatgatgaaaatgcggacgacgtctttgttgccgcagattataccaagtatgccgttaatggtgaccgagtaaaagtaaagatcactgctggtggtaatccttggaatggtaagggaccagaaggtcaagttgaagagatccttgaacatggtttggaaacgttagttggtgaatttcatccgctaactgatgaacaaagaaaaaacagtcattttatcggctatgctttgagtaacgataaaaagttgcataaataccgggtttatttgtctgaaaatggcttgatccctcaaatgggcgatatggttaaggtctcaattaaggattatccagatgaggaaaatcctgagtcaatgactggtgcagtagtcaacattattggtaataaaaatgaccctggcgttgacattatgtcaattgtggcagcacatgatgtaagaactgaatggcctgaagatgcaatggcgcaagctaatgctattcctgatcatgttactgaagaggaaaaaaagggtagagtagatattactgaccaacctgcagtcactatcgatggggatgattctaaggactttgacgatgctgtagttttatggaaaaagcctaacggcaattatcaccttggtgttcacattgcggacgtttctcactatgtgacagaaaatacgccgttgaacgaagaggcatttgctcgtggcaacagtacttacttagttgatcgggtaattccaatgctgccatttagactttctaatggaatttgttccttaaatgaaggcgtggaccggcttgttttgtcatgtgacatggaaattacgccagaaggtaaaagagtaggttataaaatttatccttctgttatgcgctcacatggtcgaatgacctacaacaaggttaacaaaactcttaagggcgaaatgaatggtttagaggataagtatgttaaactccgaccaatgcttgaagaaatggcagatttgcatgctgctttgtataaacaacgtcatcaacgtggtgctattgactttgaagaaccagaagcaaaaattattgttgatgatcaaggcaagccaacagatattgttttgcatgaacgtggtactgccgaaaagatgatcgaatcatttatgttaatggctaatgaaaccgtggccgaagatttcttcaaaaagcatgttccattcttgtaccgtgttcacgaaacaccagatgccgaaagaatcaagactttctttgaattttgtagcgcatttggcttgaatattcatgcggatccaaataacgttaagccaattgatttacaaaaagtagtttctaaaactacagatactccagaggaagctgtagtacaaatgatgatgctacgtagcttaaagcaagcgcattattcagaagaagcactgggacactttggcttagctgcagaatactatactcactttacttcaccaattagacgttattctgacttgatggtgcaccggatgatccatgcatatcaagaccaggggactaatgaagaagtgcaaaagcattttgctagttacttgccagatgttgcagaacaaacttcaacgcaagaaagacgttcaattgatactgaacgtgaagtaaatgacttgaagatgacagaatatatggccgatcaagtggggcaacactttgacgcggtagtatcttcggtaactagttttgggatgtttattcaattaccaaatacgattgagggattaatccatatttcgaatttgactgatgatttttacagttttaatgaaaaagcattgacgctaactggtcgaggtactcataagcaatataaggtagggatgccaattaaggtaaccttgattaatgctaacgttgaacaacatcagttagactttgaaatatatgatcctaatgcgcctaagcataagcataacgatcgcggaatgaataatcgtcgtcgtggaaaccgtggcttccgcaataatcatggacgccgtggtggtcagtttaataatcacagcgatcatggccgtggccgaggtaatggaaaccgtggaggtcggagaaattttaaacattagggattgatcttaatgaaaaaagaaaaagaagataatttaattgcacaaaataaaaaagcacgacacgactattttattaaggaaacattggaagcaggaattgctttaactggaaccgaaattaagtctgtacgagctagaagaatcaacttgcgggatggttatgtgcagatcgtcaacggacaagcctggctagaaaatgttcatattagtgaatataagcaaggcaatcggtacaatcatgagccactacgtagtcggcgccttcttttgcataaaaaagaaattgcacgtttggccaaagcacaatcagagcgtggtattgcaattattccacttaaagtgtatttaaaacatggctttgccaaggtattgattggtgttggccaaggtaaaaaggaatatgacaaacggcaaacaattaaagaaagagaccagaagcgcgatattcgacgcaagtatggtgtctaagatgagtctgagaagaatctcagactttttttgttgaaaaattttaaaaagtttttttattttcacaaagtaatgttcgaacaatttgaagaatgcagagaaaatcaagctaaatatttttttaattattatagaggcgaataatagtattaagatacgtttgatattgaaatattcatattaaaaatccgaacgaagagcaagacttgccaaagcggagaaaataaggtaaattaataaagtcgcttcgagagatgcgacgagagcttaaaaacagacatgcaaggaaagaaaacaaataaaaagaaaaaaagtacttgcaaagaagtaaataagctggtaatatatttaaatgtcgtcaggtgaaagcagaaaaagcttgagtaagacgaaaaaacaaatcaaaaaagttcttgacaaagaaatgatggtttgataaaatatgaaagctgtctgctttgcaaaaaagcaagacagaggtagtactttgaaaactgaacaaagtttcgctaaaagtgtgcgggtgtaaaaacccaaacaagaagcgaagtcaattcgcgagcaataaatttgagacaaagatcttaaataaggaatgagcaatcattcaaactttttaaaatgagagtttgatcctggctcaggacgaacgctggcggcgtgcctaatacatgcaagtcgagcgagcggaactaacagatttacttcggtaatgacgttaggaaagcgagcggcggatgggtgagtaacacgtggggaacctgccccatagtctgggataccacttggaaacaggtgctaataccggataagaaagcagatcgcatgatcagcttttaaaaggcggcgtaagctgtcgctatgggatggccccgcggtgcattagctagttggtaaggtaaaggcttaccaaggcgatgatgcatagccgagttgagagactgatcggccacattgggactgagacacggcccaaactcctacgggaggcagcagtagggaatcttccacaatggacgcaagtctgatggagcaacgccgcgtgagtgaagaaggttttcggatcgtaaagctctgttgttggtgaagaaggatagaggtagtaactggcctttatttgacggtaatcaaccagaaagtcacggctaactacgtgccagcagccgcggtaatacgtaggtggcaagcgttgtccggatttattgggcgtaaagcgagcgcaggcggaagaataagtctgatgtgaaagccctcggcttaaccgaggaactgcatcggaaactgtttttcttgagtgcagaagaggagagtggaactccatgtgtagcggtggaatgcgtagatatatggaagaacaccagtggcgaaggcggctctctggtctgcaactgacgctgaggctcgaaagcatgggtagcgaacaggattagataccctggtagtccatgccgtaaacgatgagtgctaagtgttgggaggtttccgcctctcagtgctgcagctaacgcattaagcactccgcctggggagtacgaccgcaaggttgaaactcaaaggaattgacgggggcccgcacaagcggtggagcatgtggtttaattcgaagcaacgcgaagaaccttaccaggtcttgacatctagtgccatttgtagagatacaaagttcccttcggggacgctaagacaggtggtgcatggctgtcgtcagctcgtgtcgtgagatgttgggttaagtcccgcaacgagcgcaacccttgttattagttgccagcattaagttgggcactctaatgagactgccggtgacaaaccggaggaaggtggggatgacgtcaagtcatcatgccccttatgacctgggctacacacgtgctacaatgggcagtacaacgagaagcgagcctgcgaaggcaagcgaatctctgaaagctgttctcagttcggactgcagtctgcaactcgactgcacgaagctggaatcgctagtaatcgcggatcagcacgccgcggtgaatacgttcccgggccttgtacacaccgcccgtcacaccatgggagtctgcaatgcccaaagccggtggcctaaccttcgggaaggagccgtctaaggcagggcagatgactggggtgaagtcgtaacaaggtagccgtaggagaacctgcggctggatcacctcctttctaaggaagcgaaggatatggagagcaggaatgctaagagaagtatccagagcaagcggaagcacactgagaaactttgtttagttttgagggtagtacctcaaaaagagctagtacattgaaaactgaatataatccaagcaaaaaaccgagacaatcaaagagaacagattgtagagcgaccgagaagagaattcttgagtaaggtcaagtagaaaagggcgcacggtgaatgcctaggcactaacagccgaagaaggacgtgacgaactacgaaaagcttcggggagcggtaagtacgcagtgatccggagatatccgaatgggggaacccaatgcagagatgcattattgattagtgaatagatagctaatcaaaggaagacgcagtgaactgaaacatctaagtagctgcaggaagagaaagaaagatcgatttccttagtagcggcgagcgaagaggaaagagcccaaaccaagtgatttatcatttggggttgtaggactgcgacgtggcagtgtaagagatagttgaattatctgggaaggtaagccagagagggtgagagccccgtaagcgaaatctcaagcacgcctagcagaatcctgagtaggccgggacacgaggaatcccggttgaaaccgcgaggaccatctcgcaaggctaaatactagttagtgaccgatagtgaaccagtaccgtgagggaaaggtgaaaagaaccccggaaggggagtgaaaaagaacctgaaaccgtgtgtctacaagtagtcaaagcacattaaagtgcaatggcgtgccttttgtagaatgaaccggcgagttacgttatctagcgaggttaagtcagaaaagacggagccggagcgaaagcgagtcttaatagggcgaaaagttaggtgacgtagacccgaaaccaagtgacctacccatgaccaggctgaaggtgtggtaaaacgcactggagggccgaacccacgtaagttaaaaattgcggggatgagttgtgggtagcggtgaaattccaaacgaacttggagatagctggttctctccgaaatagctttagggctagcctcgtggagaggataatggaggtagagctctgtttggactaggggcccgtcaggggttactgaatccagataaactacgaattccagatatccatacacgggagtcagactgcgagtgataagatccgtagtcgaaagggaaacagcccagatcaccagttaaggtccccaaatctatgctaagtggaaaaggatgtggagttgcgtagacaactaggacgttggctcagaagcagccatcattcaaagagtgcgtaatagctcactagtcgagtggcgctgcgccgaaaatttaccggggctaagcatagtaccgaaactgtggatgtgttttaaagagcacgtggtaggagagcgttctaagagcggagaagttgaatcgagaggatcaatggagcgcttagaagtgagaatgccggtatgagtagcgaaagataggtgagaatcctatccgccgaaagactaaggtttcctggggcaggctcgtccgcccagggtaagtcgggacctaaggcaaggccgagaggcgtagtcgatggataacaggtagagattcctgtactgtgtcaaatcgttaagagcgaaggagggacgcaggaggtgaagcacgcatcgcgatggaacgatgttcaagcaacaagtgcggttaagagtcaaatgcttctaaccagcaacacgagttgtgaagaggagtgaattaaaagtagcgaaggtgtggtaatcacactgccaagaaaagcttctagccagagatgacatacccgtaccgcaaaccgacacaggtagtcgagtggagaacactaaggtgagcgagagaactctcgttaaggaactcggcaaaatgaccccgtaacttcggaagaaggggtgctagccaagagattggttagccgcagtgaataggcccaaacaactgtttatcaaaaacacaggtctctgcaaaatcgtaagatgacgtatagaggctgacacctgcccggtgctggaaggttaagaggagagcttagcgtaagcgaaggtttgaattgaagccccagtaaacggcggccgtaactataacggtcctaaggtagcgaaattccttgtcgggtaagttccgacctgcacgaaaggtgtaatgatttgggcactgtctcaacgagagactcggtgaaattataatacccgtgaagatgcgggttacccgcgacaggacggaaagaccccatggagcttcactgtagcttgatattgagtatcttttaaacatgtacaggataggtaggagccagagaagataggacgctagtcttattggaggcaatgttgggatactacccttgtttgaaggatgctctaacctcgacctgtaagccaggccagggacagtgtcaggtgggcagtttgactggggcggtcgcctcctaaagtgtaacggaggcgctcaaaggttccctcagaatggttggaaatcattcgcagagtgtaaaggtataagggagcttgactgcgagagagacaactcgagcaggtaggaaactaggacttagtgatctggtggtaccgtatggaagggccatcactcaacggataaaagctaccctggggataacaggcttatctcccccaagagttcacatcgacggggaggtttggcacctcgatgtcggctcgtcgcatcctggggctgaagtcggtcccaagggttgggctgttcgcccattaaagcggcacgcgagctgggttcagaacgtcgtgagacagttcggtccctatccgtcgtgggcgtaggaaatttgagaggagctgtccttagtacgagaggaccgggatggacgcaccgctggtgtaccagttgttccgccaggagcatcgctgggtagctatgtgcggaagggataagcgctgaaagcatctaagtgcgaagcccccctcaagatgagatttcctttgcgtaagcagtaagacacctcagagacgatgaggtagataggctgggagtggaagtcctgtgaaggatggagcggaccagtactaatcagtcgaggacttgaccaaagcgaagcaaactggaaggttttttgcgagaaggattatgtttagttttgagtgtaaaagctcaaaagagtacggtggcgaaagcaagaaggatacacctgttcccatgccgaacacagaagttaagcttcttaacgccgaaagtagttggtgggcaactgcctgcgaggaaaggaagctgccgtgctcttttttaatattccggcttagctcagttggtagagcgcttgactgttaatcaagatgtcgtcagttcgagtctgacagccggagtactttgtatggaatgttgtccgagcggcttaaggagcatgattggaaatcatgtatacgggcttatacctgtatcgagggttcaaatccctcacattccgtaaacaaaagcccgtaagcgttgatcttacgggctttttgatatattgcggtctctaaaaggtctccgacctcccaaaaacggctaaatttcatccagaattgtaactatttgtttatccgatttttgttttaattcgtccagcatgtaagcatatgtattggctgtaatgctcatattggcgtgtcctaaacgtttacttattgaataaaggtcaacacccttaaagagtaacatagccacgtgagtatgccgtaagctatgaaagtggaaaccttttttattaatattaagctttttaaaatatttgcgcaacactttattaacggcacttgaagttggaatggttccatctttgccaataaataatctttcgtgaccgttctgttttagttgactaagaatattgagtaaatgctgatctactttaataacgcgagtagaggagcggttcttagtttctttgtcaatttcatctgaatcataatcaataattttgttattatcataattccatgattttgaaatatggatagtgcagtttttaaaatcgatgtcgtgccaagttagtactctgatctctcccgggcgcatgccagtataaattatagtcaaaagcatatatctactgatgtaagcaggggtaattccgtctaaaagcgattttttgagctgctgaacttggctgaaatttagataatctatttttctactgcgttcattattccaagtcaaattaattctttcggtaaaattaattcttattagtccctcgcttatagcgtctttaacgctagttcgaatacttccattagtcttatataccgtaccttttacgtgcgtttttccatacttattcataaaatcttgatatttgtgtctagtaatttttgaaattttagttttgccaaaatactcagacaaattataataaataactttatatctattcttagtggcgtttgaagtgccaggcgttttataggtctcataccagtccttaaagtattcagcaaaaattggatcttgattagatatttgattgtcgtcttttgcaacttccatctcattagcccattttctggcagctgttttggtcaaaaaaccttgcttgcttttaaatctacgctttccgtgaacatcgtaccaggaaactttagcgcgccaagtgttgccccttttttgtaagtaagccataatttaatcatctccttattaataaagcccgtttactcaattgagtaggcgggctatttttattctccttctttgtttccatcagtatcccaaattccgtatccatttccatcagtatcaaaaaatacaatatctgctttagatatattgccaggatacggcgctaaacgattgtaagcatcgctaatatcgtcaacaatggatttttgaattaaagttcgttcatctttagtgtcctgcttaataaaactttttgtgaaagtaacttcgatatgccccgatcccatgacattaatgctatcaatagtatcgccacaatatttttcagaatctaaagagctcaattgtttctttaaagtagtaagatgttctttttgaacttgtttgcgcagggatttattgctaggtactccagttttttttgatgatttagaactgctactagattttttagaattaaattctttatcttgctttttagctattttatccattttcttttcaaattccttttcagattttgacttcctcttagttttatgggacgtaggctttgattcggttgtttgagctttaggttcggttagcccacttacaactgccatacaaaagaaaatagcaatagaggaaatgattgtgatggttccatagttagaatctttaatatttaatttctttgctcggctgtgccgatatattgcaaaaacaattggtaatataaaagataaaaatattaataatacgtgcatttaaatactcctattcttcaaatctatacctatttaattcttcctgaacctgtaaataatcttgtgtcccaatacttttagcgatgtttagccagttagcatcttgaatttcatttcctaatgcaaaatactgcttaactttttcgtgaatcatgaaaacatttgctccgtgttcactgcaagaatgagcaccatcatccgtttgatagtcgcctaaaacatcgccgtcatttttagcatgtccgatttcatgaagaataacgttttctacttcgttgtcatcaagcttagagttaactactaccacatcaggcttgccatctttgccatgaactattaaaccagggcaatgtaaaggggcaaatgcaagctttaatttatattttttgagtaatttactaacattggtatccataaataaacaccttatttttcgctgtaaatccttttcaatatacctctaaccaattctctgtcatgttcgtctaatggtttgccatcaaaagaacgtgcatcatctaacatgtcatctaagtcaccgtttacgtctttatcacttgatactggattatcaactttaccagctaagtaatccacactagtatcaagtattttggccagtttaactaaagtgtccatgtctgggtcgttatagccgtactcccaattagcatatctagggaggctaactccaatcatgttagccatttgtgttttgctgtaattgtgcttttccctaagatttgatagacgttcattaaacttcattttgctacctcctcgtattatataaattgtaattagtcatattgtgataattaatcaaattagtatttgctttttgatcttcacatgttagcctctaattgtcattggctttggtcaactggtctaggttatcacctcctgcagttttgtctgctttataagtctgccacccaggcagttcctttatgctctaactcacatgctgtattgattgcttctttttgctagtccttgagcaattgggattaggtgcagctttcaaagaagcaaccagtgaatacttatactggcgagattgaacttaagaactgtaattaggggttaacatgtgaagatcaaaatctatgatcagaaatttgaaagaaaggaggccatttccaatgaaattatttgtcggtattgatgttagttctaaagatttacaggtcgttgcacttgattcagaagatcaaaacaaacgcttaattaacgatagctttgtcaatgatctttatggtgctagtgaactgaaaaaacaaattttagatctagctcaaaataaacactatgatcaaatcattattggcatggaagctacatctatttacagttttcatcctgcttactttttccaaaatgacgaagatttacaaaagctcaatgtagagactgatgtaattaaccccaaagaaaccagcaggtttcataaagtctttgaagaaagtaaaactgatcctctcgatgcttattacattgctttgtatctaagctttggacattatcgagtaagcattgccagacaagacaactatcttgctttagagcgtttaacgcgtaccagatatgaattagttcaagaactgactcgtaccaaacagcacttcattgaagctttatattatcgggttaataaactaatcactgtcgataaagataagattaatactcctcttttcggtgctacaatgatgtctattgtaaccgatagtaaaactctggatgagatcgcggatatgcctaccgaagacttaatttcttacttacaggttaaaggcagaggacgcttttccgatccagataccttggctaaagcaattaagaaagctgttagaggttcatatcgcttaggcaaagtaatgactgattcaattgatgcagtgctttctgttcattacaacatgatccaaagctttaatgaatctattaaagatctagaaaaagcaattgatcgtatcgttgatgcattaccagaaagcaaaattctggaatcaattcccggtattggcaaaacctatacagctggtattatcgctgagatcggaagtatcgatcgctttgataaagaagaacagctggctaagtatgccggcctaacctggaatcaatatcaatcgggagatcacagcaacgaacatactccaatggccaggactggaaacagatatctaagatattacttgattgaagctgccaatctagcaagattacatgatcctgttttcaaaaaatattaccaaaagaagtatgatgaagctgtctactcgccgcataaacgtgcttgcacattaactgcaagaaaattagtacgagttatctttaaattgctcaaagatgacaaactgtacaggacaccgaggtcttaatttcaaaaattggtctaaatttaaaagtaaacaaaagtttaacatttaaaaaatcaacctttaccaaggcttagtttcatatactcaaatttatgatcaaaaagaacaaatatcatcgcctttcatttgacttattaccacatgacttatttaacctacatatttattttagcttgaatacagtaaatatgtagaaaaataaagaatttctttacaaaagtatttacattatataaattctgtagtaatataaaacatgtaaagagttacagaaaaactttataaaggagatgagcgaatgacacaggttactgttgccaatgctaatgaaattttaaagcaatatttaaagtctcacggtattacacaaaagtttgtagccgataagatgggggttaatcgacaaacctttaacgcttacgttaatgggctaatcaagtttgatgccgattttgcgttaggggtttcagaagttctcggtatttctccttcgatttttttaaaagaaaaatacagaaaatctgtatgagagaggcgagctaaatggaccaattaattaatacttcaattttaaagaatttggttaagcagattgttaatgaatcaatcaaagacaatcaagacgacttaacgggtaaaacttggagcattgatgaatttagaaaaatctgttgtcaaggcaagggcaagagctgggttagaacctttatctttgatgaatacccggaagttaatgctaaatgcggtggcttcgtagtaaacccacgtaagacagcagaaggaagcagaacaatcatctttgcaaaagaagcttgtgagtggatgcagaagcaccaacatgaaattgattggaatgcaaaagtcccagtttaggaggttaaaaatgacagtaattacaaacaagaaggtttacgaaatcgtcaaagaatttggcgtgtttgacgacaacccggatcaattcaatatcactagcgatgaagattatagattttatctttggctagataacggttcactagtagcgtttgaacctggctataaaggcttgcaagacttactaagtgaagtgatggttaggttctttgaaaaccgtaagaagtcggaaaagacaacggaactagtcaatgcggctcgtaggtcagtaattgattactgtattgaaaatggtaagcaagttcaaagggagaaagcaaaatgagcaaagaagaatacgaaagagagtacggcagaacaaagttagatcacgttttaagtcatatgactaaagcgtttggaaagttcttagaattcttggcaattctatttttaccatttggaatcgttgaacaggtttgcatttacggtacaacgcactccaatcaaatcatttcactattgttagttctattaattctctttacggctttaggcgtgcgtgccgtaaataagcttagaaagtaggtgaggcatatgagcaattcaacaattttcaaagttcgtttaaagcgaacaagaaagaacaagaacttaacacaagagcaattagcggaagccgtagggcttgaggttcgtaccattgggcggtatgagcaaggttctagttttccaaacaggcgagtactttataaacttgcaaaagttttaaaagttaagactgactggttatcagcaacgaattaaggagactaaaaagtgagacaagacggttatgacattttgcaaaaagcagttaaagaaattattcaaaacgagaattcgtttgtaattcttcaaattccaagcgacaccttgcaagcaccactaataacgccaaaaaatggattgtttggcattgaatgccaaacaacaactatggcttcactacctcaaaaaatgattctagcgattcaattttatgagcaagtaaaaaaagaagcagatgaaaacgggatgtcgacggattttaaggcttttaaagaagtgattaagaagcaagtgggggactaatgaagctatggaatcaatttataaacgcgctattccaagtagacaaaaggatcgacttacagacgtccaatgcggtgttcttgctaatagtaatgctatcagcactgctagtggggatttcgctagattgaccaaagaagttaaaaagtttcttggcttggcaaagcaaaaagccctctactgctagagacagtaaagggtgttaaacaaagaaaaaatatttcaataaggagattataccacatggaaacgttaaatgcagaacaagtaaaagaagcaaagtacttgtatgaaaatcaagcgttaaaagatctatcgctagaagaaccggatgcaattcttttctgggatggtgaagagcaggcattaattactaaaaatgctgatgactttgacaacgcttatgaaaagccaatggactttttcatgaaaaaggtaaatcgagattataaaggtgatttgaacaagtttgcaaaatcgcttggttacgggctaggcaaagcaagcttttcaatgggcgatttcttagccgattggaatgacttaaaccaagattcactaaaagaattgatctttgaatactttgacggcgaagaactaggagatatttacgatgactaacaacgaactaatccaatttgacggtattgagtacccagtaagctataagccagctgaaattatttttccaaagtatgaagagatgaaaggcaacatcttaaaagttcatgatgaattcgctgattggacagtaacaccacaaaatcttaaatcctcaaaagaagtaagaaagaatctcaacaagcttaaaagaactatcaattcgcaaagaatctcgattactagtggcattcaaaagccagccaagatgtttaaagctaacattgatgacttgatagcaattattgacgaaacaacaaagaacatcgattcacagcttaaacattacgatgacaagctaagacaagataagcatgatcaacatgtcaaattcattaaacaagcttgtgaagatgctggcgtagaccctagcaagattaggtataacgccagttggggcaacaaaacctatagtaaccctaaatttgaagccgaactgtacgagcaagttgatattttacgcaaaaataaacagcaacttgaaacaaacaaacgaattatcattcaaaaagccgatgaattaggaattccatttgctcactacttcgaccaattgcaaagagaggtcccacttgatgagattctcaacgacatgcaagcggaaaaagatgaactgatcgcaattgctaaaaagcaaaaagaaactaagcaaaaagaacaagccgacttggttaaacatggagataaggcaattgaccctcaaacaggcgaagttaaggacaagacttatactttcagtcttgaatttcaaaacgttactaaatatcaggttgatcaattaaacagtttcttaaaagactggggaatcaaagcaaggagaattaaataatgactacaaaaaaacaaggttttgatgattttattgagccaaatccagaattaattaaaaattttgacatcaaaaagtacaaaaaaacagacaatgagccaaaattaaagattcttacttatactgatgaacagcggaatcgaaaagataaagcttcatgggctatgcatttagcaatggtcaagatggctattgtgcagccaaaaaagacacacgaagttgaagttcgaggaaccactcaaaacggcaagccttatcactacacttacaaatatgctgatttagctgatgttgacaagtcaattatgaacgctattaaagctactaagcaagatggtaagccagtgttgacttactacttcgatattgacaacggtgccgaaggtgtaactattgaaaccgtaatcgttgatgcgacaacaggttacagcgtacgaaccaataaagtttggttcaaaaatgttaacgttggtaacgcgcaggcaacggcaagtttgattagttacggtaaaaggtattcactttcagccgcgttcggcattgccagtgaagacgatgacgacgcacaggttcaaaaaatgaatcaatcacaagcggttgatacaagtgctataaaaattatttttgaagattacgttaacaatcactcaattaaggctaaaaactggattaaaggtaagcatgataaggcaacaggtgactatatcagacagttgcttggtgattacgagcttaaccatcatcttgacaaagctaagcaaaaagcaattgaccgccgaaaagaaaaagaccagcaggttaaagaagcggtcaaaaagataaagaaacctaaatcggaggacgaggtaatcaaggatatcgtggataagcctaaagcagacccatttcccgataaaaaagaagacgctccaatgagtgaagggcaacaaagtttatttggtgacattttaggtgattagcatgaccgctaaaaaaagaaaaacaagcgaaaacaatcgcaagttcaaaggtgtttggattcctgctgaatattggcttgatgaaaatttaacgattatggaagtagtcatcttaactgaaattgacagtcttgatggtgagaacggttgctttgcaagtaataaacattttgccagttttatagggatgacaccggcttatgtgtcaaaaataatcaagcacctaaaggaaaagggctacataagtgttaagtacaaaaccgaaaatcgggttaccacaagatcaatcaaaataattagaggtattaactctagtaaaaggggtattaacaatagtttagggggtattaactctagtaaaaggggtattaacaatagtttagaccccattaactatagtgtaccaagtaatacatctagtaatacatctaatagtaatacaattagtaattcttcttctgggcgaagagaagaagacccggaaagagaaagaatttataaacgatttttccagcttgctaggatgaacgacaagatgaaagatcaaactactaatgcgtcattagacgaaattaaacagttaagaagtttgatttaccaatgtagtatcgagactttatacgctactactgacaaattcacggagaaaatgcaatggaacatgattaatgacccatttgcttatttactaaaaatgcttcgtgacgggttagcaaatgacaaatactttgaagggtaaggaaaatgaacagaatcaaagaactaaggctacaacatggcttaactttaaagaaaatggcatgtgagctaaacatgcataacagcgctttaagccaatatgaaacgggcaaaagaaacccaaaagttgaaatttggcaaaagctagccgattactttggtgtatctgttccttatttgcaagggagatacgaccatttaactaaaaaagaagccttgcaagtaatccgcgaggttatgtcagtttgtagcattagcaaagaagaactaaaggagaggctgtaaaaaaatgatttttgatttaaaaattggttgcgtagtaactccacgccaattatctgatgtcttccaatacgcttttatgagatggaagcttggtgttgactacattcccaatagtcgcctttatgcgattgatacgcggaataacggaaaaattcaagttacgggtgatcggaaaatcgtttacttaggacttggtacttggaaagtaaaggactagaacaatgactcaaagaaattacaaagaaaaaaatgttcaagaaatgaacatggaagatttaatcaatacggtaagcgacgacttaaaaagctatgacaagcttaaaacgcttgaaggcgttaaaaaagaaatgtcggtcggtttgtttagcaataacttatctgaaagagggctaaaggcttatatcaggttgctagagcttgaattgcggttagcaactacaagggaaccaatctttcatgattcacgtggttttggcgattacctagccggcaaatatgcggaacttgatcacgaagaaatgcacttgattagtttgagcaaccaagggcaaattatttcagatgacgtagtaggttcaggaacagtagaaaattcagctgtttcaatacctttaatcattaagactttatgccttaatggggcagctaactttattgtggtacacaatcacccaagtggctcgatgaagccctcaaaagctgatttaacaatgacagattcgatttataacttgtctaagctgattaaagttcacatgctagatcatttcattattggcaacggaaattatttctcatttgcggaacatggtttgttgggagattaacatgaaattttacttaacgagtcaaaagtacgcaaacagcaaccctaatttaactgctaatgaaattgatcagattagtaaggcttacttagggaagcttagtaccgtttgcacagttgaggtttggctaccgtctaagattaaaaagacaaaatgtgcgggagctggtatctgccgcggcggatcaatcgttattaacgttgcagatgtacccactttgcaatcttttagaaaaatgtttggtaaatacttccttacggttgctttcatgcagccagactatccaaaactagtaattaaagatttatagaaacaaggtaaagacaaaaaatgaatacaaagtacaattttagcaatcgtaagtttaaagcaagtaaatttagtgacaatgtcattaagttaagacattgacaattaagggtgcttttttagagatcgaatcatttggattcgatctctttttttgtataaaataaaggcgaaaagaccagccttttcgcctatcttatatattatatattttaaaccttcaaaattattgccagaaagatggtgttaattatgaaagcccttcataagaatattctagaacgtcttgatcaaattatcaataatactggggatcatattcacgattttattaataatcctcatgcttttaccaggaaacgcactttagatgcagcgacagtccttaaaactacaattaacatgcaaggtcagaatttaaacagtgaactctttagagcttttggcgaagatgcaactaaaaagaacgataaagtagttagtacttctgcctatgttcaacgcaaaagccagctttctcctgcttgttttaaacatattctgactgtttttaatcaaaatctatttaatattcaactttttgatcatcactaccgtttgtttgccattgatggctctgactttaatcaaatctggaatccgaaatcgaataacattgtacaagcttcttctcataaaaagaaaccctattgtcaaattcacgttaatgccttatatgatctattgaataatacctaccaggattgtatttttcagcctaaatcagaaatggatgaacgcaaagcggctgttcaaatgcttaaagctttgaattgtggtccatatattgtaacaatggatcgtggctacactagtttcaatatgattgaaaactgcaatcgcctgcctaactgtcattacataatacgaactaaggctggacaaggcggagttaaagaaataacgacattgcctgatcaagaatgtgatcgtgagatttcctgcctggtaactacttctaactattactacatcacgcataaagccagtgagaatattcaccatgtccagcatcattatcgccaatatattaagtatcgctctaaaaatacccaggatctaagctgggattttggcgagttatgcacaataaaatttcgagcctgcaaatttagaattaatgatgccaaatcaggcaaagaagaatgggaagttgtgctaaccaatcttgatcgaaaaaattatccgctaaaaagaattaaagagctttatcatctgcgttggggtattgagacctccttcaagaaattgaagtattctttaggcagtgtacagttccattccaaacaagataaatttattgaaatggaaatttatgcccatatgattatgtttaatgcaatcagtcaaattgatgcacaggcctatattccgcaaaagcattgcaagtatcaatatgccatcaatttcaagcaatcatgcttgattattcagagcatgtatttggcttcttctttaacgcaagattttgaacggatccttattcagatcagctattataccattccaattagaccaggccgcaaggacaagagaaatattaagcccaaatcagctgtatattatttatatcgcgtagcttaaaaaagcagaatctgtgctatgccttatttgttgtacgaaaaaagcaccaatttaaccaattaaatgttaaatcagtgctttaaaagtctaatattaattgtcaatgtcttaacttaatgacattgatttagtgaattggataccaacccaagtcactacaagaacagtagctttacacataactgccctagttctttgaacagctatacaaagggcgtagcaattacttacgtaaacggtcaaacctttaagactaaggatgtaactgtagaaagcatttaattgcgggcgaaagcttgatgaaaacaccaaatttacagttacggatggactgcaatatttttaggaggtttagaaatgaacgataaagaaaagaaactaacagaagcactaaaagagtattttggcagggatgttggcgatgttgagggtgagcctaacttcatggattattctacgaaattaccgggtttggtgcatcctataaagcgtatcgtgatcactacggtaccttacaaaccaacttttgaagaaagacgtaaagagttggttgaccagctagataaggatttgaaagaaattgatggcgactttaatgtgaaaattaaaggggataggatttacatttatctttgtgcagttcgcttatatgaattatatggcgaggataacatggctatttatagcgtttatttaaaagtggagaaaatggccaaggctatggaggctatttcaggcttttcatggaatttgaggcaactaaaggagcaataaaaaaatgactagtgaatcagtaacttacttaaaaaatatcttagctgtccaaaatattagcggtcttattacttctgagggctatgacttaatcgatcaagaaaagttagtaactaatcacaatcaggctaagattttagctcgattggttaaagaggtaggtactaataattacaacgccggttacgctgaggggagagctgaacaagcgtttgaagacggtaaaaaaatggctgagtttatgaaaggagcgtcacaaggtgaatgacttagtaatcatgaaaagccagaaggctttgacaactagcttgaaagtagctgctacttttagtaaagagcataaaaatgtgcttcaaagtattagaaatctcactgctgaaaattcagcagtgaaaaagatgtttgctgaaagcacttatgttaatgatcgggggcaagaacagccaatgtactacatgaaccgtgacgggttcaccttgcttgcaatgggctttaccggcagggatgcaatgaagttcaagcttgaatacattgaagcctttaatcgaatggacgaattaattagaaatgaagacaacttaccgcaaacgccggaagagcaattacaactaactatggtggttgctaatcgccttgttaagagaatgggcaaggttgaagcccgtgttgaccatattgagaaaacaagtgaattaagtgaagttcaacgctaccagctgcttcaagcaagaaaaaagaaggtaattgaagccattggcggtgtaaatagcaattattacaaagaaactaaggctagaaaagtatttaatgcgtttggtagagatttcaaaaaagagtttcaaattccaaggtatgacagtttagaaaagcaatactttgaaaaagctatggaatttactcacaattggtatcctgattttgtccttcaacgtgaaattcaaaattccaacgcacaaactagcttaaaaatttgataagaggtgaattgatgttagacattgaagtaggagaaacaatcacagacggctttaaaacttatgtgatgggacatgacttaaatttgcattttgtcagttatggcaaccatgcaactcatcacgtaagcgaggatgctttaaaaatcattttgaaaacgcaggagtaaaggatgcaacgagttagaagggtgagacgggaaccaggtcccgaacataggattcaaaacgcaattattgccaccttaaattggcggcgatgcgctgtcattaggctaaatgctggtgctattcctacaaggaatggtcatcttttcagggggttaagcctggaactcctgacttaatcgggtaccgtttaaaagataagcaagtattttttattgaagttaaggcgccaaaaggacgaattagtcaaatgcaacaaatgtaccatcttgatttaatgcataagcatgtaatccacggtatagctagatcggttgaggacgctgtaaagatcgtcaatgaaggcttaatcggctatggttatccagattacaaggaagtatgaagagaataggggaaacaatgtattttaaattaattatgctggtagttgctatatatgcttgtggcttaacagcttttagccttggtatagttctagcaagtaaaagaaaaacttggaatttaaagctagctcaatcatttggaattatctgttttggcgttattagcaacctatttattctatggatgccgcattgtaactggtttaatgcgtttcttggaatagtatttataatcttgccagttctagtatgttggtcaatattggtattagttccagactcacgggaagcctggtaatggcgtttttaaagattaaagaagcttgtgctgctaaaaatattactttaaaggatttatctaagttaagtggtattagtgagagatcacttgaatggtacgtcaagcaacaaagagagccttcgttaagtagggctgagaaattagcaaaagtattagaagtttcaccagcgtggctggtttcatgggagtgaagattgtgagtttagcaggtctgaattttgataaagaaaaaacaattagcaacgcaaagaattttcttgaaaatgattttccagacattatgaattattcaggtctgccggtaacttacttatctagtccacttctcgaccctacgggtgttcacggcggcggtaatgtaaaccatcagcccgatcaatttttaaaagctatcgagcaacaagacaagtacgatgcaattgttaaggactgtgaaaatgctacccgtgctgtggttgaagctatgagcagttgtcctgataccgaacgggatccgtaccgcaaaattttggttagaagatacgttaaaaacgattttgcacaatggatttataacgatatgaattgttctccaagaacgtacggacgtaaaagggacgaagcactttatatattcgctcaacacctagagcggtaccgcaagaagtacaatgctgaaaggctaattcccgtgttgatggtgcatggatgacctatttttgaccaataaacgccaatttttgaccgataaatgaccaacttttgaccgaaaaacgccaatttttgacgcatttttgaccaacacttgaccattaaagcgggttatattagtagagtcgaaagattaggaaagagatctgatctttcgatgttgctcgttaatttaacttgttagtcaattattacgagtcattaataaactcttgtttttactataaatatgggttgtgcaaaaggtgcaaccctatctcctacaagcctagtgtaacggcaacacgccagtctccaaaactggttatgaaggttcgaatccttcggcttgtgtagtctgcgaagacgtgtaaatccaccgagcggtctgagcttattaaacattgttctagtcctgataagctcgaaggcaagtttgaagaggcttgccttttatgggcagataggtagtctgctcaccgttaagttgatacttgttattaatttagatttctcccagaatttaggtgagtagcataggttcaatacctgtggtgcccgttgagtaatctggtgcgtaaaataagcaacttatttcacaacacattcaattgaattggttacgaagtgcacccgtgttggttcgaatccaacattactcgttgtagtcagcgatgatgggctactagaatccaaaaaattcaggatcacgttaattgcagtagctgctaagctattgctttttgtttttaggggggaaaattatgaacaaaattttaacttttgccgctggtgtggttatcggtgtagtttacaaggacaccattttacaagtagcaaagcaagtagaagccgcaaaggatgctaagtttgataagaaacttgaagacaagctggcaaagcactttaaagatgtaggcgaacaagccaaggaagaactagataagaaagttcctggtgcgtttgacccaagtaatctggatgacctgtactaatgacacctacacggtactttgagttatgtcaaagacatagccgtttagttaaggcaagaaaaattgttaagtactgcaaaactaatacagttgctaacatcaagcagaagattctatttaagcaagaaacgggctttatgccgcaagattacttagatagatttggtaagaaaagttaggaaatgaaaaataacgaagaagcacctatgacagattcactttttattagaattgctaaagggaaaattgcagattaccttttagaagttggattaaatgctgatctttcaaaaagtgaattaatggcaaaaatccagatgacttggtacagctatatagctcgtaattataaggctatgttctgtatccatgattttaagggcaaagatgaagcaaaactttctaatcgctattttgaagtaacttatattactaaagatgatgagtttgtagctgatgaatatttgcagtttgttccaacaacggtaaaggaagtttaagggaatgcaaaaatgaatagaaagaaagtaacttacgtggtaactaaagataagaacggtaaggttattagtattaaatctgttcctgttccatcattattagatagagtgcaacgctcgtgtgaagaacgtttctcatcgtttttgttagcagttattgttgtgttcatatgtttaatgacgattatgttagtgcttaaaagtttaggaggctaaatcatgcaagtagaagctaaatcaattgatgaaattaagccctatgaaaataacccacgtgacaacgatgacgcggttgacgctgtagcaaattcaattaaagaatttggctggcaacagcctatcgttgtggacaatgagggagtaattatagcaggccacacacgcttacgttgaaaagaaaattgctgaaaaattaggcttggttagtgtaagcacaaggtctaataatatcggtgggaaagaatactccactaaaatgtttttagtagacagggatgtttacgaaaaggctggttacaatcacggtaaaaagcttaatattaacggcaagttagttcaagataagtatgtattttcattttaaggggtattaaaaatgtttgatgaaaaagaattcgatttattgcaaaaggtttgtgaattaggtacaaaaggcttagaactatccgaacaaagtttaaagaagcaaattgatttagttggtgatgatcttaaaagatcagctaataaaagctatcttagttctgacgatttagaaaacgctgctagaagattaaatgatttagcttcgcagattaagcaattaaagttaatgcaaaaccaagcagggaactttgaagcttataagaagcaacagcttaaaaaaataagaaagaaaaaagaattgacaaattaagaaagttgtttattgaactggttagtaaatcagttcttttattttgcctaaaaaggtggtgatttcagtttggcaaaagctacaaaagataagggtggtagacccgaagtaataacagaacaaaaattaaatcagtttcaaacgtttattattgctggctgtagtcttaaagaagcttgtgaacaaattgaaatctctacaaatacgtggcgtcgatatatgaagagacatccaagttatgtcgctaagtttgctaggtggaaaaaggaacttgaagcacgggcaaaattgaatattgccatgaagatcactaacgaaaaagataccgaagcaagtgtttattaccttgaacgacagactaagttaagagatcaagcggcaagaaccagtttaaatcgtgctaaagcccaacaaacacgtttgcaaaatcaattgttgaagaagcaacttgaacagattgatacaactgcaagtaaggcaagggatagcatgagcaagttagacatggataccttgaagcatttagcaaacttggaccaaggagttgatatcaatggaattgactaatgagcaaaagcaaggtatagcgttagcggctagagaagaactggcacgcagaagctacgcctattattttttattggctaattctgatattaacgccaagctttatgattacatcgagtatatttgtggcaagcttcaagaaataattgatggtaagcagaaacatttgatactggaacttccaccacaacacggaaaaagtatgtgtgtgactgagactttcgccagctattacctgatgaaataccctgaaaatcaggtaatggtaacgtcatatggtgaagatatgtatactcgttttgcctgcaaagaaagacagcatttcactgattgggctaaccgattattcggcttggccatcggcaaaaatagttccaatgattttaccgttgcagggcaccgtggtgaagcgtattttacttcaattcaaggtggtggtactggtcgaccagcggacttgttgattattgacgaccctattaaggacgcaaaagaagcacaatcgcctacagtaagagaaaacatttggcaagaatggacttcaacgttttcaacccgtctatcagccaacgcttcaattatcgtaattatgactaggtggagcactgacgatttagccggcagactgctagacaaaatggactttgactgggaagagatcaagtttcctgctattgcctacgatttaccgagtggtcaaactgatgctataggcagacataatggcgaagccttaaacccagaaaagcacccaattaagcagctgctaacccagaagagtaatttaggtactcaaaaatttaatgctatgtaccagcaagcaccaacagtgcaagagggtaacattattaagcgtgagtggattaagttctatgttcctgatcgtgagacgatggtaaggcttcacttaacggagaaagaagtcaaaattttgccacgacacttgcagcagactgtccaagcatgggatgcaacctttaaatctaaagaaaatgacgactttgtagcaggtcaaacatggtcaagacgtgatgcggaggtatttttacgccctggttggtgccacaagcggttaagctttacgcaaaccctagacgctatcaagtatcagtcaaccatttacccggaatcaacatcaaagctggttgaagacaaggcaaacggtccagctattcttgatactttgaagaaaaaaataccgggaattatgccagtatcgccaggtgccgacagcaaagaagcccgttttgcttctgtttcaccgtattttgaagcaggtcaagtatatataccgcaccctaaatggaaacccgaatcagaagagctaattgaagaatggtgtgggttccctaacatgccgcacgatgaccaagttgactctgctacttatgcaattaagtatttaatgagaaacaaacggaaaatatcactcggctttatttagaaaggaggtcattaattgtttggttttggcaaaaagaaaaagccagcacaaattacaatcggtgccgactttatggattatgaaagtaaaggcgtaacacccagcagattcggtgatacgtcttcttttatttcaacaaggtatttagatagaaaatacaactataaacaagctgaccatctgtttaagtctaatgcgcttgctaatcgaattgcccgcttaccagctgaaacagcaactcgaaacggctggcggatagttattaacaacaatgatgaaaagcaagtagtctatcaagcggctttagatgcattattgcccaaagaaaagattgctagtgaaattatttatagaaatatcattggagatgcgtatttaaacgttaatgttgatgaaaaacaccgaactagcttagaacagccattagacccgcacaacattttaaaagtaaattcaatcaatgcttttagtcaaatgcatgtcaaagctaaccagatttgtaacgacccaacgctagaaaactttggcaaagaagaaaagctggtacttgagggcctatctgatggctcagatgataattcaaaagagcctgaaagtatcacaattgacagtagccgctatagacacatttcgctggacaagatggaagacgatgcaacgggtacatctttgctaatgcggtgctatgaccagattaaaactcttgataccggtttgtactcaactggtaagatgctttacgagtacaacatgaaagtctggaaaagcgatgcttattttgatctgtctgaggatgaccagcgcaaaactgatcacagaatgagccgcggcatgggtaccgagtcactggtagttgttgggaaagacgatgacctggaaaaagtttcaaataagccgggcggaattgattcgctatttagttttgcttggcaacaacttagcacagcaactgggattcctaaatcgattttgatgggtgaacaggctggtacgttagctggcgcttcacaggacgtagttaattactacgacagtatcggggctcttcaagagcaggtaatcaagccacaacttgaatggttggttaaattgctgatgtggtccgaaaatgtgggcggcggttcagaagacccagactcattagattggcacatcgagttctatcctttgcagagactaaccgacagtgaaaagatcgataatctcggtaagctttccacagcgttatccacagcaattaatggtggctttcttactactgatgaagcccacgatattttgcttcaacaaactactaacgaagcaattccaattcagttaactggcgatagtgccgatgatgacattactgaacaagatagaaagtcttttgccaaagaaaaggctaagatagaaaaacacctcacgggagcaaaaaaccatggcaagaagacgtaaaacaatcccaaagacaagataccccatgaacttggaaaaatcgtatctgggggctttaaagcgtcttgtcttgtcatggaaaaagaaagcgcaatggtactccgattattatttgaagaattacatgttaggcggagcgttgtcgattgattcagatgatgatgaaaatgaccctcacaaaatagagcggttgtccgctttgattgcgttgatgatattggctataaagaattctaatagtaaacaggaacttgaaaatgttgcaactcaatttgtactgtcagtaaatagtttttcttatagcaatgtcaatgcgcaagctagggcaatttcatcacaagcaattgaaagcaatccgactattcaagcgtttatcaaagcaaagattaaggagaacaccgcttatatcacttcgatgcgggataagtacgttgcacaattgcaaagcgacatttaccgcgcaattagtgatggtaagggtgccacggaattaaccaacgcaattgttaagcgtacgaatatgtcatataaccatgctcggctaattgctaacgatcaaacaggcagtattttagccgagttgaataaataccgcgccacacatgcgggctttgaaaaatatctatggcaatccatggaggatggacgggttagacctaaacaccaaatactagatcaacaagtttttagatacgatgatccagatggcggtgacgatggacagcttccaggtgagccgattaattgccgttgtgttgcgatgccagtaatagatgattagcactcatgaagggtgctttttttatgcagaaaggagccagaaatatggcagataatacaccaacaagtacaccagcaggtagtacaagcaagcccttaacgggttcacttttaaatagtgctaccaagccggttattgataagccaaccagttcaccggttatgaagccggttgaaccagcaaaggaccctaaaggaatgtttgattggtctgacgctaagccttacgtgattggtaaagatgaaagtttgtttgatgtcgctcaaaagttctctgtagctttacagcaacttagatacttcaaccacatcaacaaagcaacgatgaaggttaaagaaggtcaaacaatttacattcctaacaaaccggttgaagttccttacggtgcatagcttatgggcgcaattaggtatgaaactactacgccaatcgataaatttactatcgatccaataacggggtttctgcacgtcaagaatgtgccaatcacatgtgagggcgtacgaccataccgtcaattcgatgggcaacgaattcaagaagctaagacaccagaggaattgttctcagctgctacggttgattcagccaataacaaaccagttactgacgaccacccaaccgacgcaaacggcaacacaatcatggttaactgtgataatttccagcgatttatgaagggctttatgtccgatcatgcccgtgttgataaagcaaccaagactatcagaaatgatttgaccataactgatagtgacttaatcaacaaaatcaggcacggcaagcaagaattatcaattggttttcaaatgcagcttgatccaactaaaggtgaacttaatgggcaagcctacgatgctaagcaaaccaatatcagaattaatcatgttgcgattgtagaccgtggtcgcgctggtcactcggtaaggctaacggctgatagtgcagaagaaattcctgaagataacgaaaaaaagaaaggtgaaaagatggactttacaaaagtacataccaagcaaggtgatattagcgttgctgttgaagatgccgacaagttaacgaagcttgttggtgacgctgacgacagcaacagcaaattagaaaagcttattgcggagcgtgacaaacttaattcccaaattaaggagttacaaggctctggcgataagaacaaaaaggaagccgccgacgctaagaagaaggctgatgaagctaactcacgcgccgacagcgcagaagaagaaaataagaaactcaagtcacaacttgcaggggatgcattcgaagacagaatcaacaagaccttagcattccgtgaaagagctaagaaagttgttggtgacagctatgactttgccggtaagagcgaacgtgaagtcgaagaagccgctcttaataaaaatttaggcgaacacgattattcagataaaagtgacgactttgtaagtggtctttatgaaggcctatttagtactaatgctggtggcgtaagttatggccgtactgctggcgattcgaacgaaaagactgccgtagagaaagcacttgaagcacgtcaaaacttatacgaaggaggtaacgaataatgccattaccagttggacaactttatcaaaagaaagaattaggtaacggaactatcggttctttaaaagattattcaatttataccgttaccgctgctactaatatcgattatggtgttgcccttgatattcaagacaatcaagccgtagtagcaactaaggcacctatctatgcaatttcggttaagcgcgcttacgtaattggtcatagttacgatgacatcgaaaatgaccactggcttaaaggtgaaaagattggcgctttacgccgtggtagcgtgtcagttccaattactgaagacgttgaccgcttagatcaagcaactattaatgctgatggtacttttagaccagctaagccaggtgagcccgttgttggtcgctttatcactgcaggcgatgctaatggtaccgcaatcgtagatgtcaacttaactgacatgggtactactggcacaggcgccacggtagacaagccatcaacaccaacaactgatccaagtactactaatcaatcagccggcacatcatcaactaccggtaccgataagaagggggataaataatgccaaaagcaggatttaatacgggaactgcctatagtgaacttttcaacgttgttgatccggttgttttacaaccaaaacgagaagaacttcaaggcagaacaatgttccagctaaaaccgcttcccgatccatgggcacttacttacgaatgggcatggaaagaaattatgggccaagcatcagactacaccgaccgtgcaacagacatcactaccactgatgtaacttaccacagggaagtaggctatgttgcagagaaggcagctggattcgaatattcacaagctgatttagagcgttcacacaccggcggtagaaatatcgatattattaccgaccgtgcaaccgctactcatgacgcgttagcaaactgggaggacgctttaattttcaacggtaacggcgattcacaaagacctatctacggtttaactactgatgctgagaccgcaggttatcaagctttagatgatccaagcgtaaccttgcaaaaggtagtagaccctaacaacaaggacgcatttagtgatgcttacaagattatcaattacttcatggatgccgcttcaaagattactttgttgcctggctaccacaacgttaagccttacttagctttgccaccaaaggagtacgaattattaacccgtccgttggttaaccaatacaatccagacaagactttatggaacatgatccaacgtaacggagctaacagcgatggtgtatttgctggaattaaacctgttaccgagcttgaagctaagtattggaacaatgaaaagggacaagcaggtaaaaagaatatgggtattgtttaccttgatactcctgatgttgcacaaattgttattgcaatggaaccacgccgttacggcacagccattccatccgctgacaacggattaagctacaaacaaatgtacatggaacgttcaggcggcttgtcagttaagttcccagccgcaattgttcagttaaccggcttgaatgatggttctgaaacatgggcagaagctaagacaaaggctaagtagtatgaatgacacaactaccacagcagggctgattaaaaagcttgatactgcaggtatgaccgatgacgtacccgatgaatcactagaagcgttgattgaaaacgcccgaatgattgctatttctgacgggtttcctaaagtaaaaaagcttcatggtgcggaaatgccagcccttgagttggctacccgtgccatgacactacaccttttagcaacgcaagacggggcaggtagcggaatgactttcgaaaaagtcgatgttttggaaaaccactatgctgataccagccgcttgaagtggttacaacgctctccatggggacagctctattggaggctgtaccaagattatgtcggcaatcccgtaaaaattagaataatcgaacactgatgaaaattgaaggttataaccgtattccagaagtaactaaggaacttgactacttaaaaacgcatcaggttgtaattggtttttttggaaaacgtgaaagtagattactaacaatcgttggggctaacgaatttggagccacaatcaagcctaaaaatggcgagtggctatggattcctactaaagactgtcctaaaggaaaaggcccgaaagatattgaaggcttgtttattcctaaagggcaccgagtagcatgcgttaacgatcacggcaagttagtggcatatttctatcttagtaagcttgttcaaataccagcccgcccgtttattcggcaggcttatttagctaacaaaaggaagtacacacaattagtgcggagatatattgcaaaagttctagcaggtgaagcaacgggtaagcagctacttagccggctaggcgttgcatgtactgccgacatcgctatgtcatcaattaagttgaagcacccaaagaaccgaccagcgactatcgagcgtaaaggctcagacaatccgttggtcgatacgggtgagcttcaaagacaagtaaagttcatgatagtttcgatttagaaaggggggtttgatctaatgcacaaaatgaatccggcaagaatgattcacaagtacggtgtagacattaaagtttggagttcggggcaattctataaaccccgctatcgtggcgcacctactgatgcccctgattattcccaattaagcgatgatgatgctgaaaagcttcatgagccagttttaccaatgtcaagtcaccttgcacaactcttcgcccagttagacggcggcggagaagtgcaaggcgatttactttggttatcaattaataaatatccaattgaaagtgtggtcaatgttccgacacaaggcggctactacaaagttactagtcgatcatcttatgaaggttatacgaatccacacttttttgagtaccaattgaagggagtaaatcaggatgacacaaacccaaatgccaccaatgatggacaactacctagtgatataccaacttatccaggtagttaatcaaaaatatcattgcggtgtatatccgcaaatgaatgccggtttgcgtagcaattacccgtttattacttatgactgggtagaccctggaagtgacgttactttagacgaaactgatgtcatggaagtaagacttcaaattgatgtgcaagcaaccgacatgtatgaagctttgaatacggccaatgatttacgcaagacattagcgcacagttacggatatagaggattttttaaacaagcacatgtgattccacataacgtatcaggaacaagctctcgaaatttctataatggcacgcaattacccgtttatagatttggtttcgattgctcgttttctatttaccgtgctggaactatctataaaccggaagaccttaactttgaatttaatgaaacaacgattgaatcaattaaggctatgaatcaaatgacaggaaaagaaataaacgtaagaaaggaagaactttaatgccaacattaaccacggtcgccccttacgaccgccctatggatgtgaacgtcattatgactgtcctacatccccaaccaattaaggggctaggtaatattttgctgttaaatgctactactgcagctgctaacggtgattcagctggcaaagacgacaaggatggcgcacaaaagacaccagctcaaactttgccagatactttgtcaaacaccgaccgcttgaatggtttgcttttacgtaagactgacccagctactggggcaatttaccgtgaatataagaaccttgatgcggtggcagttgactacaaagaagattcggctgtttacaaaaaggctacagcctactttgctcagccaaagcactcagaccgcttagccgtcttagattatgacaagtcaaaggcttacgatagtttgaaggctttctggtacttcaactggacttttggcgtatgtgtagacaacacaattgacgattcaaccgttcaattgtcaaacatctttgaagtaaacaaagatcacttcttagttctccaaactgaagatttgtccaagtttacccaaatgatggggcaaaactacactatcggcttgaagcacgatttgaatgagccaatggacgccgcttttgtcggtggcattgctcttaacgatgttggctcaattacttggaagtttaagcaacttgaaggcattacgcctgaaaacttaactagtcaagaattggctggtattaacaatattcatgctattgcctatgaagaaatgatgggcaaaggtcaaacctcagagggaactaccttatcaggtgaatatattgacttgcttcacggtgtgatgtgggttcaaaccgaatgtcaaagccgcttgcagaagcttttgcaagataacggcaagattccatatgaagctcaaggcattgccatgattcgtgcagtcttaacacaagttttgaatgaagcgtacgacaagggcatcatcatgactgacgacactactggtcgcccaatgttcagcgttactaccactccacgtagtcagcaatcacgccaacacttgtcagacagattctatgacggcgctagctttgaataccatgcttcaagcgctattcatactattaccgttaatggcgttgtcgattcagacactatcatggctgcttaattagaaaggggagtttaaatgccttcaaagattaaaacatctaaaatgcgtgaatatgatgccaatgactgcaccattatgatcaatgacaaattgatgtatggattttcagaaaacagcatgtttacggttactgataaaactgatgcaaatacgtacaagattgatccacaaggatcagctactaaatcgcacaataacaagactatggcgggctttacattgccattagatgaaacatctccttgcaatgcctatcttttagacttgtttaacaaggatgaatttttcacagttgacatcattgacacaacatcacacatttcttgtcattatgcatcaattgacaagattccagataagcaaggcggcgcacaagctggtgaccgtaattggcctattacaatgcttaacaaggaagaaacttcgaacatgacctatagcgattaattcgaaggtttcaagagactttcatgaaatcaaattaacttaaaggagacttaataatgagtgaagaaatcaataacgcaaagcttgccgaaaaggcgcacgaagaacaaatgaagattaaggaagaagcggaatcaagcaaggtcacacctttgactgctctttctaaaaccgtaaccattcgtgaagatactgatcaagaatatcaattaaagcttcaattccctggagttgaagaagcaactgaaattctggaaaattcccgtaacccgtttggcgcaattaatcgtccggaattgctgagagaaagcttgaagcacgtgattattcaaccaaagattaagtcaattaagtggtggaacgatcatgaaggtctttatgaagccgccgacgctgttttgaattttcttactgaaaaactctagacagaaactaggtaatagagaaattgaaagacaagccgattatgttgaactccctctgcgtttgataatgcacgggattcctgaacggcttgtaaaaaatgctacaccggatcaattgctgatcatggctaaagtagtggaacgagatatagaaagcacaagcgccagccgagcaaatcatatcggtgaattgtttggcggtggtgataaatagaggtgatgcctgtcaattaaattgatgggtttttattttgcctgaattttaaagaaaggagctgaaaacgtggccgatatcgaacatctagggattggaattaatacaaacgttgaatacaattcgctaaaagaagcagagcaaacaactagagagtttatttctgacctcggtgttttagaaaaacgctttgatcgtttaaaggctcctggctttaccgaacaattcaacagaaacagaaattccgttgaagagacaagtcgtacagttgctggcttaaaaaagcaacttggtggtatggctaccgaaagcggtcaaacaacagctaccgttaaaaagcatttagaagaaacaaagaattcaactaatcggctaattaatgcaaatgtaaaattaaagtcttcgattgctggcgtcggtgattccgctaaaactatgggcggtttatctaacaccatttggaaggctggcgtttctgcaaacaccgcttcaggtggcttcaatacggcaaaagatgctgttgagaagacaaatgggacgctaaaaaacaacagatcagccagcgaccgtgcaactacgggctttaatttgcttcatgatgcgggttcaaaattaattaccgttggaacaggcattgcggcggcaatggtcccagttgcggcggcttttaagaatgctaatgacgaagccactaagctagctgatgagtacaacgttattaaaaacttgcagcaaaccggtggagatagtgccgctaccgctaagaaaaatacggcggctattagacgtgaaaatgctgatttatctacaaaatatggcgttgatcaaactgagttggcaaaggggtcagaagagctaattaggcgtggttattccggaaaacaagatttagccgcacacaagtatttcgtacaagctgctaaagcgactaatgagcattatgatcaaattgttaatgccgccgctcctatgcttgaacagtttggctataaaaagcgagctggtaacagtactaagaagatggcacgttacacacgggaagttttaaacaaagcggcttatatcggtgacatgacatctggtcaagttggtggtgaaaacggatttggtaattcttttaaaatgtccggttcaattcttcaccaaacaggtcaatcactttcgtcatcattggctgtacttggtactttgtcaaacttcggtgaagaaggcacctctgctggtactggtgtaaggcaaattgtctcaagtttaattggtgcttcgaagagcaagacaaagaccgcggcactaaaagatttagggttatcgcccgctgatttctttactaaatcaggcaatttaaagcagttgcctgccgtctttgatattcttaaccgagctacgcagggcaaaaagtctaaccgtgttactggcgacttcaaacagttattcggtcaaactggctttaacgacgcattaattttaactaaaaataatcgtgatattgctaataacgttaaggatgctaacagagctgatagtacaaattacattactaacttatctaataaaaatatgaagtcactaaaaaaccaaatggaagtgacacgacagctttttaagcaagttggaatgcaatttgcccaacaaatagcacccggtttagctaatatgcttagattagttaacaaggtcttgcaagccattaaaggatggcctgcacctgttaaaagggccttaggttatatcgccgctattactggggcgttaagtactggatttgttgctaaaaaattagttggcaatgtgcttggtattggtggtaaaactgtagccaaaacagcggcaaaaggcgctggtgaatcagctaacccatctcttttaggtggggttggctctgctataggtaaagtcagttccaacctaattggtggtaaactcgcaaaaactggattaggtcaaaaaactgctggtcttttaggcggtacagcaagcaagggggcttctgccctagctggcgctggcgttgcgcttaattctggtattgatctttataaagctatcaccacaaagaaccataaaaagaagtttgaaaattacggtaaatctataggctccgcaatcggtggcggtgtcggactatatctcggtggtccagctggtgcggctattggctctactttagggcaagtagccggcaaatgggctggcgacatggctcgcagatttagtaagactaagtttggtaaatctgtcggtaaaaccttcaagcaagccgcatggtcgattaaaactacatggcatgatgctgggataagtaagatgatcagtggcactgtcaaaagtgtaaaaagatcgtttggcagtatgacccgtgatattgggcgggattggcgcgatcttaaccgcaataaagactttagaaacttcaaaaacttcttaaaatctggattaatggcttcactaaaactcgttattaaagagggtagtaccttaattaaaacgggaatcggtgttgttcgtggagctgtcaaaattgtaacggctaacatcaagggtattgtcaaaatatcatctggcgttgtcagaacaatatctgatattttccatggaagatggagtaaagtctggaaagacatggagggcgttgccaaatcagctattgacatggttactggcatgctgtccggtcttaaagacatatttgagtccgtaattggcggaattgttggcacggttaaaaacgtttgggactttgtatctggtaaagactggcatacaaagaagcctgaaaatagcaccagtgttgcaagtgctaacaaatccgttaaagctatgcaaaacggacaaggtggtaaacatcacgccagcaagtcacatgctactactattgctgacattaaccgctcaacccacttaggcgctcatgctaacggtactgcttcattagttggtgaagcgggacccgaattagcttataagccttattccaaccatgctcgtttgcttggcgctaaaggtccgcaattggcaaatatccagtcaggtgaaaaaattctcaacgctcgcgacaccgcaaaggttatgagtggcggtctcggtgctggattaaagctcaagggatacgctaacggtaacgctaaccttggtaaaactaccaagaaagttactgatgactacaagcagattgcttctaagtcgtccaagtcacttaatgaccttactaagaagaacaattcaagttggcgtaagattacaggcaccaccacaaaacaagctgaaaagagccgaaaaggggcaatagacgaatacacccacatgcggacaggagttcataagcaaatggacaagatgcatgacggtgtagttgatcttgcttctacgactgcaaagggctttggtaaagagctaggtcacatgaccaagtacgctcattctgcaatgggcgacacaattgaccaggttaattctggtattaagggaattgatcaagttcttggacagtttggtggtaacacgtcagtcatcaagccagttaagttcgctaaaggttcaaatgggcgtttgtcccaaaacaccatggcaatggtcaatgatgcgacaattggaccaagacaggaagcaattatcaaaaatagcggtgatatttggattccaagagggaataacaggatattgccacttgaaaaaggtgattctgtcctcaatggttctcaaacacaagaattggcaaattattggggattacagcgttttgcgaaaggctctggcgtaagtcatagcagactaagaaaaatcgctgagacagctggaaataatcctgctaagagttttgctgatatgtacacttcaaaaattaaggcaagtggtacagatttacgacaaggctctattaatttagctagaaattcatcaactaagttaggtaatccatggtctaacgcaatgtgggccgtcattaacaacgcaattggcggagctaatggcaagggcggaacccgtgaaggatttttaaagtacgctgaatcaacattcagtggcgttaagtaccaaatgggtgcggcaagcaagacactatccgactgttcgggtatggtaatgcaagctttacgtcactttggcgtagatattggacgtaccaccgtggcaatgcaacacagttcaggtgttgagtacttgggtaagtcattatctaaaacaattccaggcgacttggttatctttggccatggaacaggtgccgctggtcacgtgggaattattaagaacccacacaccggaacaatgttcaacgaaacgccgccccatgcacgcgttacctcaattgctgatgacaaaggcatgggatacggatattaccgtgttcgtggcttgcataatgccgctcaatctaagaagacagcagcggctgataagaacttaatggctcttgcaaagaaagagctaggcagtaccgccttgggttggattaaaaagaatcttagcgatgatcttggctcacttggttcatttagtatcggcggcgacttagccgaaagggctaaagccctagccggcggattaaaaaagcttgatcctaaagcaaccaagaacggtattgcggctgttctgggtaattggaattttgagtcaggtggtttaaaccccggtgcagttaataatagcggtggtgcttccggtttaggtcaatggcttggcggtcgtaagtctaacttaattgcttatgctagacgtcacggcgcaagctggaaaaacgccggcacgcaattaagttttgccgttaaaggcgaaggctcagacagtgctattcttcgctccgttttggaaggaactggtagcgttgccagcctagcaaacaagttttcgtctgaatgggaacgcggtggccacaatgcccagcacgtcaaaggtgccatggagatccgcaaagttcttggatatgctaaaggcggcgatcctgtcgttggcaataaggttctagttggcgaacatggaccagaattagctgaattcaaagatccggttcacatctactcaaatgaaaagacgcggcaaagattaacgccactaactttatctaagccaaaagtacgcccagtaagaggaactggcggggctttaggtgacattcaagtaaccgtgaatattaacggtaacgttgatggtgacaatgctaaattgcaaaaattagcaaaaatgattggcgctgaggtagatcaacaagtacgtcaaaaattaaatatcattcttgatcatattggcgatgatacgggtgacgatgatgatttcttatagaaatgaaggtgatgttagtggttcaagcaactaagccaaaaaagagaacagctgaacaaaaagcccatgactctatgaaatactgggacaagcggcaaaaacatgaaggcgccgtttaccgaaaaatgttttcaaaggcgcagggctatgacttcgattcacattttgaaaagaatcaaattaaaaagaaaaagcttatccgaaaacgtgataattgtttgaagcttgttgatgccgcaaacaaaaggaaaaagcaagcggaaaacaattataaaaaagcgaaagacaagtacgaccgtattgttacgcaaagaattgatttaagtaataagttggctgaaattgcggagcacaacactggctggaagaatgagggtaaatgtgctatttatcgttcagacggtaaaggtgaaattatctatatttcgccggcagacggtgaaagtgaaaatgtttcttcaaacattacttcttatccagttgatgaaggtgcaccatatagctcatatgcccgtgtaaacagcaaaggggcaacagtagctggcattattgtaggtaaggataaagccgattcataccgcaaatggcacatgctgagtcaatggaatagctcccatattcggttaacctaccggggagatttctgttacaagcactacctaattgcaaacatgaacaacgactataaaaatcttcgagataacattgaagtttcacttacttttcagtttgtctatcaagcaaaaatcaccacttcaaacgatagtaagcatcacagaaaatcatctaaggcttctaaatctgtcgcaggtaaccgaaataagaagtacacagctatcactattaaatctggtgatacattgtgggctttgtctaagaaatatggcagttcggttcaatggatggcacgagtcaaccacattaagaatcctaacttaatctaccctggcaataaaatacgggttgcgtaggcggtgatttagatgagaaattatcttgatgttgatgttaaaaatattccctatatctttcaaataacccttgtgggcgatacctatgatatgagagtagattacaacgaagttgcggattactacacaattacaatttggcataacaataagaggcttctaacgcaggagcctcttttgctgggtcaattagttggtattgatattcctgatccagaattgccacgaattgacattcgaaccatggatgaaacgggtaaggcaacagaccaaggcaagggaacatttggatatgaggtccgcttgtatcttgacgttgttgacccgaatggatcagaaacagaagacccatcaattaaaccgctaggttatgaccctaacgaaaatgatgacgacctgacggatgaggaggtgtcttactaatgatcgttactaaagatccacatatggaatttgtggcggttgatagtaaaggacacaagcaaatcgtatataacgatgaaacttacgaacataattatccttttacgtttgaagtcccgtttactaatgatcctgtcccgtctacttttacaacaactattttcaatttaaccaagcaacataaagacttttataaaaaagggatgcactgctggataaattttaactggggtaaagaccctaaaaaaatagctgaaggatttatctctaatacgggtaaattaagcaatgatgggacaactgatagcaaagttttaacttctactgaaggcacaaactacagcaatgtagctgctcgaaagttgaagctaaaaaagaataaaaaggttaatcactacaaaaccgttaaaattactgaaaaaggtcattacaagaatcagcgttatagtacctcggtcgttgaaacttacaagagaggtcctaaaaaagggcagaaacatgtagtccaccattgggcttatcgaaaagtatgggttaaaccaaaaactacaaataaaagggttaaaagccgtgataataagacttattttgctaaccgagtttaccgaaaaggaacgacttataagcaagtaattgaaggaatagcggaacaagccggtatcaaaatagctaaaattgatttagctaaaaatgaaggaataaaaaaatcctttaccgctaaaggcaagccgctaactttaattaaaaactttgttaagttagcaaaatcggaaatgttttatgaacgtggcaagctcgtaattgtcaatcctaatagcaagaaaaatacttggtttgtgattgatgataaagacttaattcaagtcccatcgcaaaacgatgacgataagaacggggtaacttggcaaattgttacgcctttagtcccagaaattaccgttaatactggtatcatcatgaattctaagtttttaaagggtaaatttgtcgttaagaatggacagcatagttttgatggcgaaagtccacaaactcaatgcaccattgcggcggttacaaaagctaaggctggtcataaaacaaaatctaaaagtaaaggcaagaaaaaaggtaagtctaaaaaataaggagatgacgacatgaagcaaaaaaatagaattccaattcggtggtatggcaatatcaaaaaagtagaaaaccggttcaatagaaatatggaatcggcttttttagctaaagttttaacttatgaccaaaagaaacacgttgcagatattcagccgctagcgaattggatcgatggcactaaatcggctcagtacttagatgttccggttgctgaatcttgctataagcttgatgaacagctagataaatttaagccggattttaaagccattgatagtagcccagaaattaactcacattttttagaacattatccgaaaaagaagtctatgagagttggcgctgtagtgatagccgttactatggaccgtgacattgataactgggacggcacggggaacacctttacgccaaataccagcagaatgcatgatgcaaatgactcaattatcgtttctgtttataagggtgactacgatggctagagatttatttatgagtgataatcatgatctagtcattgatccgattactcacgatttagaaatgactagcggtcttgacgaaatagctcaaagaattaaagcaacgctagaaattcggtatggtgaaatgcaacgattagaccccgaaatgggggcagattatagcagctttttgggtaaaaacttcaataagcaagcggcagagaatgatatgcgagcggctattgaagcaaatgttccggaagttgaaaccgttgataatattgaatttatcaagaaacctgaaagaaaaatgcagattaattttagagccaccgcaaatatcggtgaagtagaagggggggttacaagttgacaactgattttggtttaaaagaaacaggctatattgccccaagttttgcggaaatcttagacggtgttgaagacgattaccgaactagattaggggatgatattgcactaacaagtaatgcttatctgggcatttttgcccgtttaatgagtgatgcgtcttatgatttaattcagcaacaggaacaaatttactattctggattctattcaaccgctgtaaattcagcattagaccgattagcgggcaatatcagtttgacccgtaaagttgacgctccatctcatgcggaagtagtaataacgactgaaggcgaatatttaattcaagctggcgaaaagttcgaaacagaagacggcttggtatttgacttaacagaagacgttatcacttcaaaacaaagcgacggggcttttcaaggaactggaaatgttgaatgtgaagaaactggtgaatttactaatgtaccagccaacacaattactttgtttgccaacccagatgaagactttatctctgtaactaattcacgacctgcaggcggcggtcaagattatgaagacgatgaaacttttagaaaacgattaatcatggaaaacgttgcccgtcccggtcctacagagccaggtgttaaatcagcattaatgaacctcaatggtgttaagcaagttggctttattgacaatgacaagtataagacggatgaatacggtaatcccaaatgttcagttcacatttatgttttaggtggtaacgatgatgaaattgctaaaactttaattgataaatgcgcggctggtatcactttagcgggttcaattgttaaagaagctccggacgctacgggaaaattaaaagaagttaaatttgatcatgcacagcaacacaacatttatgtaaaggtcgatgtatcaattaatgacgactggaacagtgatgcgggggttgatgacatcaagcaagctatttgcgacgaaattaattcccttgaaatggggcaaaggggcaattttacccgtctttattccgttatctatgacgttaatggtgttgatgatgcaacaattgtaattggtagcacaaaagataaattagcggaccaaaatattttaattggtcgttccgaatttgcccattgtgaccccgaaaatgtggaggttgatttaattggcttatgagacaacagaccaactaatcgcagaagtagccgaccactggaataagaaaaaggacactgttttttaccagctgttagatagctataattcgctactagaaaagattagtgatgaaaatgaaaagattgcagactggcgaagcattgataaggcaaaaggcacaacccttgatttaatcgggcaagattacaaagcttatagaattagtgatgatgatgaaactttccgttttatcatttttttacacattttaatttctagggctcaaggcacaataccatcaatggttaaaattctgggaactgccctagatgcaaagccggaacaatttaaagtctataaaacgggtttaagacatatcggtattgtgattccgtttgaaaatctacccaatgttcaaatggaaaaattcatcataaagaatattcaaaacctactagcaatgggctattggattgatgaaattaaatttctttacgaagaaaagcaaacttggtatatcggtgccaccacgcaagatagggagcacgaaattaacagccttgcttctaactggtggaagggtgaaaaggtagagagctacaaccattggtatttcggtactgatttgcagacaaccgatagatgtaccatcaatcttgcctctagctggtgcagcggtgaaaaagagaacacttcaaccggcatttatatagctactaaaatgctgattcatgaaaatttagaactaaattcgatttagtagaaaggaaggaaaaatggataacaatacaaaggacaatacccaacctaaggatgataaatccgataagttcaaagatacgattgtcaccactgctggacgacagcttttacttactgttggcgcgggtttgggcgaaattcgatataccagagttgccctattcggtcaaagtgttacaagcatggacgatgaaaccattagaggtttaacaacactagatgaccaaaaaatggaggttgtgccaaccgttacgccacctatgaataactcggttactgttagcgtatctttcagcaataaagacttaactagtgatcttacctataattcgattggctggtttgcacagaataacgatgataagaaagaagttcttttaggaattacaccagcgttaggtgggcgaacaattccagctggttcaccagatcatcgctcaacggcctcacttgatatttcattagcgtttgctatcagcaacgccgcaaaggttgacttgacggttaacgagattggcgtagctcacatgagcgatgtcaacgcggctattttgaagctcaaagcggagtatgacccgaaaattgagcaagctggcaaggtcaaaggtgcaaagatcaacgacggggcggttgttgaacccgatgatgacggtattcttgacttgatcgttgatagtgaccgcattaaggattttccggcagatttaaaagacctcaatgacctgccaagcgggacatatcggacttcccaaagtgctgctagctttgtcaattaccctaaaatgcaagatggaactactccttttaatatcccaatagtctggaaaaacgcattaatcaaagtagtcaaggatgctaatgctggataccagcttatagtgtccagccaacaaaaatatgcaatccgctattttagtaataatcattggggatattggtttcagcttccgacattatctaataatgacatcatcaaattaattgactccaaggttgacggactaaacatcggcaattacgccactaagacggacttaactagtgtttctaactcagcagtcaaaaaggttaatggcttaacccctgacggaagcggcaacgtaaacgttacctcaaccgttgcccgcggctttgatgctaacgcaaacgctacaactaagatgacggaagaaaacctgcacggcggcaatcagatcttgatggatcagaatgcaggtcaagacatcgttaactgggcaaaaggtcaatttaacacactgaacgggaatatcaataagctcaacgctaaaactgaaattcccggtgttgccaatgcaaatgatttagttggtgacgcttcttcaatcagtacttacaaattaagtaactctggcaatcttaatgtgccggatttctacccagataagcgtggcacgctaatcaacattaattatgatggaaacgctaaaactcaaatttggattccagtaggtaattcaggtggcgactcaattgctttgaggtactgggaaggcaataactatcctaaatggaaaaaacttgcaaccgttcaggatacaaccaacttgcaaaaccagatcaacgacttgaaaaagtcaaatgctgatttgatcggcactgttaactggttgaaggataatgccgcaattgctagaagattcccagctagtcaagaagcgcaagctcaacaatgggaaaatgatcatccaaactactttgcattgatcgaaaaaatagatagaaagaaggtgaaagcatgctagaccacatgatctttgacagactgaaatggttcaacatcagtgacaatactgatagcgtgaccgcaaacggcaagaattggaaagctattcctaaacaagtagtcttgccacaaggggcaaaaatcgcaactttttctggtgatggttctgctcttgcaaccgatgccataattatgctaaattctgacactactgcgaatgtcattggtaaaattgcggactgttacgcagttactggtgtttttaatggaacgggtcaaaacacagaaaataacgctacattaaacttgagctttgatgaagaatacatttttgacgatcatagatatgaagttaattttgtgtcattcggtcttattcgtgaatcagaggttaaaagtataaactgggggggaaaaaaccttctacatactgttgtatcagtggttaagcgtgctttcactctatttaagaaaggagcggaaacatgctagatcacatgatttttaacaaattaaaatggtgggactccacgaaccgcctactgatcggtaaaagaatcactgcgtcgcttgatacttaccacacggttaaagcgggatttaactttactgctgcggattatagcaatgtgccggctaaaaccaaggtagaaaatgccttaattgtagcagcttataaatttaatgggtcagctggtaatgcgccaagcggcacatatattttgactgatcaagataattctaaatggttaaaacttgatggctcggaaaaattagggggggtaattagccctctaaccaacttgcgtcaagcgtttagggctactgctagaaaggtggtggctctatgattgaaaagatgatcttcaataaaaatgattatcttatgttccctaaaaaggtcaaaattccccaaggagctcaaataagtaccatttttacggattttccaaatactacttacaattcaataaacgcagatctggaactggacgtatgcgcttcttcgaaaaacggctatctagttggcgaatataaggatttgccagttatcagtgaaggagatagtagcaccgtctatggtcctgtatgggttcgaaaatcggactgtacggaaatcttaggggggggtaattagcccgttaatccacctataccaagtacttagagccgccaccagaaaggcggtggctgtatgctagatcacatgaagtttaaccaagaaaattattatccaattagtagcagtgatgtaacagtcaatgctaatggcaagacttatcgtgaatacaaatatcagacaattactaaaactttatcaggtaatgctttacaagttatatctaaccacactaatgatttctatgtagctgatatttctgccttagatatgaatcgaaaaactagatttacttttagtaacggtgatagctttattatgactaattatttgatttataccaacgctggaaataatgattgtggggataatgtgactaaaaataattatcaaatccgattctatccatggaaaaatgtaattgaagcatattactataatggcactgacgatgtaagtcaactggactgggtaaaaatagaaataaacgtagattagcactcaaacgagtgctttttttatgcaaaaaataaccttgctcacggggcgttcccgtgggctttttatatagaaaggagccaataaaatggctgacgaaaatacacaagttgcaccagtagcgggcgccgaaacaaacgctacacaagatcaaaacagtgttgctgaacaagaacaggctttaaaggcaaagttcccaacccttacaggctttgtctacttgtcagatcctgacaatgcggatcctgtttggcatcacaaagtaatcccagtttttggcgatgaagcaagtgtggcgctcccatggcaagtccacgctgaaagaccatctgacagctttaaagacccagtttggacagtgggcgccactgattggagcgagaacgacaagaacaatcaagccgttatcttgcaagaaactacacaaaagctggctgaattggacaagaagagtgctgaactcgacaaagccaacgataaggtagaccaagcattaagagatatgcaagaagttcaagctcaatcatctaagcaaaacttagctttgatgaagagctttactgaacaaactcaaaacactaatcaaattcttggtgctatgcaaaagaccttagcaatggtaaccaaggcagttggcgcaaatgctaataacgctacaccagctaacccaacaactgatactaagccagcagaccaagcaactgataagcaatagttaaggaggacataaatcatgactttaatggaacaaattcaagcaaactttttagagatgtatcgtatggactgggaattcggcatctatgacaagaacggtatgaaggacctagtagtacaaggtttcttatcagctgaaaattaccaaaagattgtaggcgaagcttatgcgccaactactgcaacgcctcaacaataactcactttacgtgatcattagtctgctgattttcggtaaaggtttgggcttttaccttaaccgcagatttttcttttatccaccacaactagcgtggatgatgaacaacgtttacttagattgttcaatgatgattgtaggcattgcgttgctggtttacacctgttcacggtacaacaacaataagcttctaggggtgttgttggcacttgtcgtggtgctgctagcaataatttcatcaatcgaaattgaacacgtgatttttgcccatgaaatggagtttgtccagaacgctttgtcaaatacggcggttatagcctttattatctggacagcaaggcattattcaaagcgttaggggtgatatagtgcatgtcgacctaaacagcattatatcggctttgtccgctttgcttttaggctactttacctttaagcaaaacggtaagaaaagtgatatggatagcgtggagaataaccgggattacattgttgaacagaataagcgtttaaatgcggaaaacaagaaattactcagtgaaaacgagaaactcaggaaggagttaagcgatgaacaaaccaaacactagaattttagattatgtaacattggtacaagacggtgttttaaccgttgatgatgcaccacaagacatcaaggcagaggttaccaagtgggttcgctactttgcaggaatcaaagacgattcaatggtcaaggatcctgaaagcattacaccaacaccacaaccagaaaagaagccagatactactgcttttttagctaagaaggtgactgactaatgagtttaactcaattaactagctacgcatgggttgcctttttggcagttgtggctgtatgtgttggcgtttcaactggcattgactgctttgccaaaaaatcaaacaagccgttacccaagcaagttatgaccatcgatgaaattgccaagtttgtagtaagtgaagcggctactctcgatatttcaggcgctgaaaagaaagttaaggcggtgcaagctttgcttgatcaagctaagcaagaaaacaagccagtcaccgaaactgtggccaaaggcgctgtccagcatgcttacgatcaaatgcaagccgattctgaaaagactacacaaggcgaggatgataatgtccaaccaattggctttgtaagtggtgatgattctgatgcaaaagactagatataagacgtacaacgagtacgtctttgaatcttttggagaatcgtttgaaaatcaaaagatagccaaaagaaaccaaacgaaaggtggtgaaaaagatgtcaaacttaaccgtatcaaagcgaagtttgggtgctgatgccgcaagctaccaatcagaaaacgtaagctacgccggcattaaatttgcattgattaagcttacacagggcactggatatatcaaccctaaggcaaaggctcaaatcaaaagctcacttgcccataggcttttaactggcggctacttttatgctacacactctggctctgtattaaaagcacgggcagaagctaagtacgctgttgaaaaggcgaaggcctatggcatccctcttggttcgtatcttgcggacgactgggagcagggcagtggcaacgacgtcaacggcgctgttggttcaaacactgatgctgtcatagcagctatgcaagtgatcaaagaagcaggatataaaccgctagtatatgctggtgcttatgtattgcgtaaccgtctcaacacagctcgaattgtaaagtcattcggaacttgtttatgggtagcttcatataaagtcatgggtcgtcaagattctgctgactttaattacttcccatcaatggacggcgtagcaatctggcaatttaccgataattacaagggttacaacgttgacggcaatatctgcttgatcgatttaaaggcaaattcaggtagttctaagcctaaatcaacaaacaagaccggagaatcgctgtctctgcatcccgttgtaaagtggaatatcggtgctgtcgcagtagtatccaattcaaagggagcatacgtttacacaagctccaaactggacaagcgggaaagcgacaagctaaaaccgtgtggttccatgtggcaggtgttcggattggaaaacggtgccgtaaaagttggcaaaaatcagtttttcgatggtcgtgccgtttatgtgaaggctaaccctatcgcatataacgacagcaaacatgcagtagctaaggttgttttacctcatactcatgcgctagacgctccaaaggctgacgcaggcaaggtttacggcttggagcttaactcaaaagtcgagatccagggaagagtcggacgctttttaaagattaaagagctacacaaaggcaagcaggtatatgtgacgggcaaccgtgcgtatatcgtgctgtaaactttacaaagatagccataatgagctataatttatccgtaattttatccataataaaaaagaaaaggagttgtaaaagctccaaatgtcgtgcataaagccacctcggaggattgttcctctggggtggcttttttgcgttatattttaatttttattgcaaatgtagatacaaaagtatatactaaataaaaaggtttaattaagacttgtaaggagatttataacaatgtgcaatgtggaattgaaacaatggggcaattcactagccgtacgactgcctaaaactattttaagcaaagccggcatcaatgaattaccgaccaaatttgatgtaacagttaacaaaaataatgaaatcgttttgaaaaaacaaaaagagcctgaaagcttaaaagagcttttcaaaggctttgactataaaaaatattggagcgactgggaaaaagaaaatcctggcaagtccaaagaagaggactggggcggaccagttgggcgcgaagtcttttaatttagaagtccttattagaagggaggtgataatttgaacagcagaaaagacttccatcaaggtgatgttatcatgatgaactttgacccaaccaagggacatgaacaagcgggctatcgtccagcgcttgtcgtgtcaaacgatgatttcaatatgatgtgtggaggagtgatcaaagtggttgctattactactaacgaaaaagaatttccactacacgttgaaattccagaaggtttgccagttcacggcagggtagagctggatcatgaacgttcaattgattctcggtcgaaagccagagaatgtaagtatgtatgcagtgtaccgtctgaatttttagatgaaattctccgaaaacttgcattaacttataaaaaaagccactagggagtaacactagtggcaaattaaagcttatatactgtctatatggttagattcagtatataagcttttttggtgcttgtaaagtcgcctgattttatagatagctttaaggcggtccaaatcaaacgctaaaaaattggcgtgcagatcctgaaaagttaaaaaatagcatgggagagggtacacctactagctaagttgcatgatcttagaaaactgccaaaatgagaataaataatgtgctataataaattttggttgcaatgcaggattttcaagtcgatttgacctaaacaaaaaccgctcacagtttggttgtgggcggctttatttttcacgtaaaatagatgttaagagccacaaaattttatagggtctccgaaaaggtctccaatttaaaaattaatatgaattagtaaaaactaaaaacgcataaatctagaaaaaagaaccggaaaaaattaataaaaatcgttactaaatccctcacattccgtaaatatatatgaattggaactatgttaacatagttcctttttttctacctaatttttcatatataatggagaaagggaggaaatatcgtgaagctacgaaaactaattccatttttatttttaatatctctattagctataacattttccgcttgttcgacaaagggagaagagaatactgctaagcatagagttaatattgtaacttctactaatatttatgcagatattgctaaaaatatagttggtaaacatggtcatgtacaagctattataaaaaacggcgatacagatccacatgattttgagcctacgactggctctgccaaagaagtagctaatgctaatattgttattgccaacggtctaggatatgatgactggatgactaatttagccaatgctaatgatattcatgtggttaaagttggtaatcaattgatgggattaaaacagggggataatcctcatatttggtataacttaaacatgcctaaaaagtatgttgattatctagttaaaacagcaagtaaaattgatccaaaacatgcagcatattttaagtctaatgctgcaagctatttgcaaaagattgatagtataaagaaaattgctgctaaaattaatgggcgtgaagataaaccggtttatgttagtgagcccgtgtttgattatgcactagaacggtgtcattttaagattggcaatcaggcatttgaagaagctgtagaaaatgaaacggatccgagtgcgcaagttattcatgagatgcaagtcaaaattaaagctagaaaaattgctttctttgttaataatattcaagcatcaagtagtacagttagtggcatggttaaactagcagagcaacataatattccagttctcgatgtaagggaaacaatgcctaatggaattagttattattactggatgaaagcgaattatcaaaaattatttgaaattttttaaaaataactattgcataattagggactatcaggtaatataataaacgttgtgattgagagatcacggtggtaataactaataaaaataaataaaaaaagttcttgacttttaaaacatgattagttattataataaagtgctcttgattaagagatatgacccgttggtcaagtggttaagacacggccctttcacggccgtaacatgggttcaaatcccgtacgggtcactaatggaggattagctcagctgggagagcatctgccttacaagcaggaggtcacaggttcgagccctgtatcctccattgttcgggactaccgccgccgcggtagtctttttttatgcaaaaagaacgaacaagcaaaattattattttatcggttcaagtcctgagaggattcactatgattagtgaagatgccttgtaaccgaatagccaatgtctatatagggggactaatatggaaagacgtttgtttacttcagaatcagtttctgaaggacatccggataaagttgctgatcagatttctgatgcaattttagatacgatgttaaagaaggatcctaattcacacgtagcttgtgaaacgatcgtaactactgggatggtttttgtctttggtgaaatttctaccaacgcttatgttgatattcaagatgtagtgcggaagactattttgaagatcggctatgatcgtccagaattaggttttgatggcaataactgtgctgtgatggttgacatcgatgagcaatcacctgatattgctggtggggttgatcactcacttgaaactagagaaaacaagtctgataacgatgaattggatcaaattggtgctggtgaccaaggtttgatgtttggctttgcgattaaagagacacctgaactcatgccattaccaatttcgcttgctcatcgtttaatgagacgtgttgctgctttgagaaaagaccatactttagattggcttcgtccggatgctaaggctcaagtcactgttgaatatgatggaaacaataagccattaagagtggatactgttgttatctctactcaaactgatgcagaagtttctaatgaagaaatccatcgggcaatgattgatttagtcattaaggaagttattccggccaagtacctagatgaaaagactaagtttttgattaatccgtcagggcgttttgttattggaggtccaaagggcgattctggtttaactggtcgtaagattatcgttgatacctatggtggttacgctcgccacggcggtggtgcattttcaggtaaggatccaacaaaggttgaccgttcagctagttatgcagctcgttatgtcgctaaaaatattgtggctgccggccttgcttatcgctgtgaagttcaattggcttatgcaattggtgtagctcacccagtttcaattatgattgatactgcgggtactggtaaggttgacgatgatttgttaactgaagcagtacgcaatgtttttgatcttcgtccagccggtatcattaagatgcttgaccttcgtcgtccaatctatgaacaaacggccgcatacggtcactttggtagaacagacgttgatttgccatgggaaaagactgataaaacacaagatttgcttgattatattaaaaataagcaataaataaaaagagaaagtaaaaaagaatgaaaaaaacaaacgtgcctatagtcacgcttgcgatttttatgacaacttttatgactgccattgaagggacaattgtttctactgcaatgccaaccatagtttctgacctagatgggctcgagattatgaattgggttatatcaattttcttgctaatgacggccgtttcaactcctttatatggaaaactggcggatagcattgggcggaagccagtttttttgtttggaattgcgttgtttgtcataggctcatcgctgtgtggacttgcacaaaatatggtggagcttatcttattcagagtaattcagggattaggttctggcgcggttcagccagttgccatcaccattattgcggatttatatgctctgcaaaaaagagcgaaaatgttaggtcttaactctggtttttggggagtagcatcagttattgcaccgctattaggtggctttatagttcagcatctatcctggcactgggttttctacatcaatgtgccaattggaataattgcctttttgctcgtaattttttgtttgcaagagcctaaacatagctctaagtctaagttagatttgcagggaaccatttggttagtaattttattgctagctttgatgtttttcttacaagatttaggttcaaacactaatatcgccataatggccgctctagccgttttagtggtaattagtataattatgttctttagagcagaaaagcgcgcagttgatccaataatgccactcactatgttaaaagataaggagttccttgcaattaacctgattacgttattgatttctggcgtagtaatcggctttgaattttacattcctacctggatgcaaggtattaatggtactaatccatctctagccggttttgctgtaacgcctagttcattaatgtggattgtaggttcgttcttaattggcgggatgctaggccgctgggggattaaaaagacatatgattatatgttattggttttagttgtggccgatttggttttgattttagtgccgatttacacatcattctgggtcttctgtgttattgctgcctttaatgggaccgcctttggggcaattacgacagcttcacaggtgagatcgcaggttttggtacctaaggatgacataggcgttgccacttcgtttaatacgctgatgaagtatctgggacagacaatgatggtttctatctacgggattgcttttaatacgatgttggcgcatgggttaagcaagagatcggggttgaatcaagaaatgatgaataaaattgtttctgcagaaaatgccaaaagtctggctgccaatgtagtgccacaattacggcaagttttgttaggcgggttaaaagctgtttacgttgtttctatgattgttattgtagtctcgattgtattgaatcaattgtatcgagatcgaaaattgaagaaaaattaagttgaaggagccacatgcaaagtagagcatgtggcttttttactggaaatttaatttcagtatttttattatatctacatatattgaaatattatttctatgaaagtaaaatagagttaaaagcaaggtgattaaatgaatgttagagatagaattttagagaattatacagagttaaaaaaatcatcacgtattattgctgatgcggtacttgaaaatccaaaaattttgttaaataaaaatgctaaagaaatagggaattatactgatacatctgcagcatcagtaattcgtttttgtaagcaattaaattataaagggttaaaggactttcaaatcgatttagctcaaagtactgtcaaacagtcacaacttaagccaatagatatgattgtaactaaagatgacaaagctgatgaagttatgactaaattaagggttagtttgagtcaaaactttgaagatttatctaagactattgatatcaaggatttacaaaaagctgtatccttaattaaaaaaagtcgagctgtgtatatagctggtattggggcttcaagcttttctgctaaggatcttttttataaactcattagaagtggaaaaacggttttttataatgatgatgtccacattgcattagagagaatatactattcaacgccaaaagatgtcatgatatgtttttcttatagcggattgactcaggaactattacttgcagttaaacaagctaaaaaaaataaaacaccaattgttgcagtgactagaaaatccgaatcccctttgagtaaattagcagatataaatttaaaattaccggatcatgaatcgctgatgagagttggtgctataaattcaacttttgctcaaatgtttatttcaaatgtgctttatttatgctcaatttcaagtgatttaggtgaggtaaaacaagaaatggaggctacaggaaagcttctcgaaaaattaaaagaaaggaatgattaatatgaatatcaaggatttaactacagagaaaagaaacagtgcaactatgcatatcgataatatgtcaactttagatatggttaaaactattaataaagaagatcagaaagttgctgaagcagtaggaactcaggaggagcaaattgctcaggcaattgacatggcttctaagaaataccatgatggtggacgattaatatatattggagctggcactagtggaagattaggtatattagatgcagtagagttagtaccaacgtatggaattagccctgatcgtgcaataggattaattgctggcggtaaaactgcaatgtatttagctgttgaaggtgcagaagattcagaatcacttgctgctgaagacttaggtaagctaaatttaactagtaaagatgtagttctaggattagctgctagtggtcgaacgccatatgttattggaggattagactatgcacaaaaaatcggtgcagggacaatttcaattgcctgtgttaataatagtttaattggaaaacatgcagaaatagctattgaagctgtagtagggcctgaagtaattactggatcaactagaatgaaagcaggaactgcacaaaagatgatcttaaatacgatttcaacgggcgtaatgattaaacaaggaaaagtttatcaaaatgttatgattgatgtcttgcctactaataaaaagctagtaaatcgagcaattagaattattacgtcagttactaacgtatcaatagagcaggcgaaagatgtcttgcttaaagctgataaaaatgtaggattagcaattgttatggcaaaaacagggttaaatagtgatgatgcaagtaaactattagaaaaaaataataacaatgtcagccaagttttaaataattagctatactttgaaattaaatttcaaaaatcattgattatatgtcttaaaagtgatatttttatatttaagtaagcgcttactaataaagaataatgaaatattatttctatttgtacaaaaattgcatattagtgattgctttttcaaaagagttttgataatactactttgctaatgaatattagtaataagtaagggagggagaataatgaaacatcgcaattttttattagttgctctttcagttttacttttaggagcaggcttaactggatgcagtcagaaaaaagaggctacagctactccggctgttacacctcataagagtcaagttgttacaacaactatgtattcgaaaaaattacatatggattggaattatgatgtatatttaccagcaggttacaatccaaaaagcagtaaaagatatcctgttttatatatgttgcatggaatctatggtaatcatagaaacttgctagaaagatttaattctcaacaaattcttgatggagaaattcatcgctgtaataaaaagatgatcgtagtttttgttgatggctttaatagcttttatattaatcaaaagcaaggtgggatgcagatggaaagtgccatcgttgatgacatggtccctactattaataaattgtataagacagaaaccaatcctaaacatgtaggtattggtggtatctcaatgggtggatatggtgctgccagattggctttgaaatatccagatatttttggaaatggtgttctaatttctcctgcagtttggtaccgcttgccgaataacaacccaattaaaacttcacagtatgcttttcaagatggaaaaagtaactgggattggaaattttatgatagtgtatttccaactaggtacattaatagtaaatcagagaaagataagttctttgtagagactacttcaagtgatactaccgttccagtaaaaaatgtcgatcgctttgtgaaaactcttaaaaaccatgacattagtgttaagtttgtaagagacaacggtggcaaccataattgggcttattggacttcagcagctccacaagcttatcaatgggcattagataatttaaattaggaggtgtaaaaaatgagcaaagatagtgaattagccagtagcattttgaatgatattggtggtaaagacaacgtttccgcagttatttcatgtatgactcgtctacggattagtgttaaagatgattcaaaaattaatttagatcagttaaagcggcttaatggagttttaggagtagttcagtctgaaactttacaagttgtactgggaccgggaaaggttactaaagttggaactgaatttagtaaattagccggtgtgccacttggagaagaaggcggcgatgattccaatgaaacattagatgaagttaaagctagagctcaaaaaaataaagcggcacaaaaagctaaacatgataagcctttacaacgtggattgcatcatattgctaatgtttttattcctttacttccaggaattattgctgcaggtttagtcaatggtatctgcaatgttattgattatcaatctggtagtgcttttgccaatgattggtggtatttaactattaaaacaataggatggggactatttgcattcttaccaatctttgtagggatgaatgcagctaaagaatttaaaggtagtgcaattctaggtggaattggtggtgtattctgtttaaatttaacaggttttgctgcgtaccctttaaattcactggcagtatcaatgccattcactaataagccatatgttgctggtgttggtggtttgcttaccgcactgtttatggggatctttatcgcatggacagaaagacagattagaaagtttatgcctaatgctttagatacattcttaacacctctttgcaccctgatcttttgtggtttaatttcagtggttttcttacaaccagttggtggttggctaaccaatattatttacgtggctatggacttcttatatgataagttaagctggttcggcggttatattttatcgtcaactttcttagcattagtatctgttggtttgcatcaagctttaacgccaattcatgttatgctgaatgaccctactggtccaactcatggaattaactatttacttcctattttaatgatggccggaggtggtcaagttggtgctggttttgctctttggcttaagagcaaaaataagcgttttaaaaatatggttatgagttcaattcctgtagctattttaggagttggtgaaccattaatgtatgctgtgaccttaccattaggacgtccatttattacggcttgtcttggtgctggtttcggtggtgttgcagcatcattattccatttaggtactgtctcacagggggtatctggattatttggactgttaattatgcagccaggtcaacaggttgaattcttgattgctttgttaatttcttatgtaggtggctttgttttaacatggttctttggaatagatgaagcaagaattaatgaagtctttcctgaatgataaaattaaagaagtaattgaaatcattgtaactattacaatgatttttatttttaacggagaagaaaaaatgctaggaatatctgtatatttccaagattatgatgaaaactatttgaaaaaagcagctcaagctggtgcaaaatacgtttttacgtcacttcagattccagaagaagattattcagatctggatcaaaaattaccgagattttttgaattgtgcgatgaattgggacttgaagtaattcctgatgtttctccggctacattggaaaagctaggaattaaaggaggcgattttgaagccttaaaagataagggattcaaggccttaagattagattatggttttgatgactttgatttaatcaaaaagctacaaagaaatttctttattttattaaatgcaagtgttgtgtcactggactatttagatcgtgccagaaatgcaggggttgattttggtaaattagctttaacatataatttttatccgcatacagatacaggtatgggatggacagattttaaacgtaagaattggatgttaaaggactatggcttaagaactcaagcttttgttcctggggatgcacttaaacgtttcccactatatgaaggcttgccaactgtagaaaagcatcgtggagtttcgccttacgttgcagctgttgaattaattcatgaagcaaatgtggatgatgtgtttattggcgatagcaaggcatcaatcaaaaatcttcggtatattgtagattatcaaaaagataatattttaaacatagaatgttcgctattgccacaatatcaacagctgtatgatcaagtgattgaagtaagaaaggacatgccagaaaagctgattcgcttaagtttgcctagaaaacctgatattccaatttgtaatactttaaataggcgtaaaggcactattacaatgcaaaacaaattagctcaaagatatagtggtgaagttagtctgattaagtcaaatttaccttttgaagcacgtagtaatgtgattggttttatttcacctgagtatgtgaagttgcttgattttattgattcgagtacgaaaatcatttttagaaggctgacatagaagaaaggtgatattatgcttaatttggcaaataagatttcagatgtatatcctaatttgaataaaacttctaagttgattgctgatgtttattttaaagattcaactcttttcctaagtaaaaacttgcaggaattaggtgctattactaaaacaagtggcgcatcagtgattcgattttgtagaaaattgggtttcaaaggctttaaagattttcaaatagcttgtgcacaagaaatacctggcaagcaagataatacggtggatacaattattaatgaaaatgatgagccgaccagtgtgctttacaaattacagattagtttagaaaaaaatattgcagacattggcaaaacaattgatcatcaatctctagcttcagcggtacaattaatgcgagccgcacagaagatttatgtagcaggagagggtgcatctggcttagccgcacaggatttattttacaaattaattcgtagcggaaaagatgctgctttcgtccaaagttcgcacattgctttagagcaagtagctaatattaagacagaagatattttaattaccttttcttatagtggattaactcaagaaccactgctaatggcaaaacaggcgaaagaaaatcaagctaaaataattgcagtaactcgtgcccagaattcgcccttaaaggatattgctgatactataattgcgttaccatcaaatgaaaaattgttgcgttacggcgctgttaattcactatttgcagaaatctttgcttctagcttgctatatttgagtcttatttcgccaaatttaaaagaactaaatatgaaaatgaaaactacgcaaaatttgactaatcaattaaaagtgtagaatctataaaataacaactaaataaattttaaaaaatcaaaaatattttcatgatgaaaataataaaaataaagaaaaaaaggaccagtttggtccttttttagtactttttttgcggttggaataaatctatatttgacaatgctataattataaatggaaagtggcctaaaaataagataacactattgaaagcgcattatttgcctccttgaaagtaaatctaagtagctgtacacttaaattgagctgaataacgaacgttattttttggcagagacttgtaatgcgagtaggaattatgggggcgtaaaaatggatattactagtttagcaagattccaatttgctatgacgacgatctttcactttttcttcgtgccattttcaattggtacgatattcgttgtcgcaattatggaatcaatgtatgttcatacaggcaagcctgaatataaaaagatgaccaagttttgggctaatatctttttattgagttttgccgtcggtgttgtaaccggtatcattcaagaattccaatttggtatgaattggtccgattattctagattcatgggggacatctttggtgctccacttgcttttgaagcattgttgtcattctttattgaatctacctttattggtttgtggatgtttacttgggataaagtggggaagaaattacacttattctttggatggatgatcgtctttgggacaatgacttctgcattatggattttaacagcaaactccttcatgcagcatcccgtcggctttgctttacgcaacggtcgtgccgaaatggctgactttggagcacttcttaagaatccacaattaatgtatgaatatggtcacgtaattgttggtgcacttttaactggtactacaattttgactgggttagctgctttccaactattgaagaaacgtaacctttcagacattaacaagaagatctatcgtaagacaatgcgtttaggcttaatcttaatgttaattttctcagctggtgaaattgctgtgggtgatatgcaaatgcaatatactttgcatgatcaaccaatgaagttcgccgcaactgaagctgtttataagacaactggagaaaaggctccatggacggtagttgcaattgctaatccaaagacccatgaagttaagggaattgatattccagacatgttaagtattctttcttaccacaagactactggttctgtaaaaggtatggaagaaattaacaaagaacttgaaaagaagtatggtacacatattgatggtcgcaagatggactactatgtaccagttaatactttattctggtccttcagagtaatgtgtggttttgctgcattattattcttgatggcaattgttggtttaatcatgactcgtaagaataaagaaaccctttataaccatcgttggctattatggatcttcgcacttcttacattctcaccattcttggctaacactgccggttggttaattaccgaacttggccgtgctccatggacagtttatggattatttactattgatcaaagtgtttcaccgaatgtttcagtggcttcacttttaacatcaaatattgtttacttctgcttatttactattttagcaattatcatgattgcattggttgttcgcttcatgcacaacgatccagatgaatatgataaggctcaagaggcaagcaaagtagttgatccgttctcaaagggggccatttaaaatgtcatttttacaaatactttggtttatcttaattggagtattgttctcaggcttcttcttccttgatggttttgactttggggtaggaatggccgtgaagactttagctcataatgaacctgaaagagatcaagttgttaggacaatcggaccagtttgggatggtaatgaagtttggttgattactgctggtggtgcaatgtttgcatcattcccatactggtatgcaaccttattctcaggttactatttaattttattattgatcttagttggcttaattattcgtggtgtgtcatttgaatttagagcaaaatgtgctccatatcaaaagcatatttgggataatgcaatggcgatcggtagcgtaatggccacctttctctttggggtaatgtttatctcaatgattaaagggatgccaatcgatgctaaaggcaatatttcagctagcttctttgactactttaactggttctcaatcgttggtggtattgctttaacacttctttgctatttgcacggcttaaactatattactattaaaactaagggcgttatttcagatagagcacaaaactatgcacaagctttatactgggtactctacgtcggtgaagttgtctttgctttattattgattttccaaaccgacttcatgagagtacatccaattgcaactttagtatgcttagcattaattgttggtttctctgtagcagcacatgtagctactttcactaacaagcaaggaatggctttaacttgcagtggattaacgttgatctcattggtcgccttaatcttctgtggtttattcccaagagtaatgatttcatcaatcagcagtaaatatgatttgttgattcatagtgcatcatcatctaactacactttgattgttatgactgttgctacttgcatcttggtaccatgtgtcttggcttacaccatctgggcatattggatttttcgcaagcggatttcaatgccaagaatcggagaggttaaataatgattgataaacagctatttaaaattgatggcgctggttcaatcttaaaaaaacttgcagggcttgagattctgcaagctttttttatagtaggacaagccttggcactagcgtcagtcttaagcaaattgtgggcaggtcaacctctcgattggctactactaattacttttgcagcttgctttatcgccagacaattgatcagcacactgagagattcaatgttagaaaaatattccggtcgggttgcagaagaattaagacagcagcttttaaataaagtctttcgtgatggacaggctttagtacaaaaacaaggaaccggtagtttgattactatgtccctagatggtgttgatgaggtcaggcaatacattaagttaatctacagcaaagttttaacaatgatgattgtgccagttttaatctttgtcggcatgctgtttttaagctggacatcagctgtgattctgctagtcatgtatcctttaattgtcttattcatgattatcctaggtcatgctgcacaggatcgagcaattaaacaatttggtaactttcaggttttatctaataactttattgattctttaaggggaattgatacgctgaagtatttaggcctgagtaaaagatattccaagtcaatttttaacttgagtgagggttttagaaaaaagacgatggcggtgctaaaagtagcaatgctttcaacttttgccttagactttttcactaccttgtctattgcaatcattgctgtttttcttggttttgacttgatgaatggtaaaattgcactttttcctgctttaggaattctgattctggcgccagattattttttgccaattcgagattttgcgggggatttccatgcaaccttgaatggtaaaaatgcctttaagcggatcaacgaattgattaatctgccagaggaaaaaactaatgatttacctttaaaaacttggtcagctcaagatcaattgaagatcaagaacttgaagtttacttatcaaaagggaaccgaaattggaccggtttcattacaagtccaaggattcaagaaaattggcattatcggaatgagcggatctggtaaaactagtttaattaacctgctcagcggctttttgactccggatcaagtgcaaattgaactacaagggcagaaaactacgaccatgaatattcctgcttggcagcgtcaaatgacctatattccgcaggagccatacgtttttactaagagcttgcgtgaaaatattgctttttataatccgcaggcaagtgatgatgaaattaagcaggcgattcatatcatgggtctggatgccttgttaaatgatttgcctaacggacttgatacggtgattggccgcggtaagcgtgtcttgtctggaggtcagtcacaaagaattgccttagcgagagcatttttggatcctaagcgaaaaattatgatcttcgatgagccgactgctcacttagatatcgaaacagaaattgacttaaagaagcggatgatgccattaatgcaaaataaactggtcttctttgcgactcacagactgcattggttaaaagaaatggactatattctagtgatggatcacggtcaattggttgagcaaggaagttatgagcaattgcagcaaaatcaaggctacttctgcaagttaatggcaggaatgagaggtgaaaacaatgatcaataagattccggttttaagagcattaaaaaatgatcgttgggttcgcccatatttggaaaaatatcgtaaaacgttgattttggcgattgcactgggcattttaactttcgtctgtggcgggggcttgatgttctgtgctggctatttaatcagccgttcagcagctaaacctgaaaatattttgttaatctatgtgccaattgtcttaactagagcatttgggattacgcggccagctgtccgttattttgagcggctggttagtcacaattgggtgctcaaaatgacctccaaatttagacaacagctttatgactcattggagcgcgatgcgactatttttaatagtaagtatcagctaggaaatattctgggacttttgtctgatgatgtcagccatattcaaaacttttacctaagaacgatctttccaatgtttgtagcttggggcttgtatgcaattatcgtaattggcttaggcatcatttccccactgatgggcatttggatgttgatcctgtttttcttgattatttttgctattcctatttggtcagtcttaatcaatggtgcgcggcaaagctatgaaaaaacggttcaagacaagctctacgttgatttgactgataatgtgatgggagtagatgactggattttgtctggccgcagcaaagaatacttggccttgcatgtcaatgatcaagataaatttttgcaaatcaacgcgaagatgaaaaaatttgatcgctggcgcgactttgttttacaaatcttctgggtgttggtaattgtgagcctagtaatttggggtgctgccagatttggcgggcgttcaacttattatactaattggattgcggcatttgctttggcattattcccgactgttgaggcttttgccagtttgccgactgctgctcaagagacgaatatctacaaagattcgcttaagcgtttgaataatttgccagctcctgatcggactaagcataaaccaatcaaattaaccgcaccgtttaatttagtattaactgatgtgcattatgcctaccctcaaactaataaagaggttttgcatgggatcaacttaaatatccatgatggtgaaaagattgctattttgggtcgtagtggtgcgggtaaaagtactttagctgccttgctcagaggtgatcgggtaccagctaaaggacacgtaactttaaatggaattgataccagcaagtttggcgatcaaatgtccaattactttagcatcatcaatcaaacgccatatttgttcaataccacgattgccaataatttgcggctaggtaatgaagatgccacagatgagcagctatgggacgttttgcgccgagtaggtttggccgagatggtgcaaaaattaacggatggccttgatactaaggtggatgaggcaggattacgcttttcaggtggtgaacgccatcgtttagccttagcgcgaatcttactgaagaatacgccaattgtcttacttgatgagccaacagttggcttggatccaattacggagcaagctgtaattaatatgtttattaaggaattatccggtaaaactttaatttggattacacaccacttgcaaggaattgatcagatggatcaagtaatttttattgaagatggacaaattaatatgcagggtacaccggaaaaattatggcagacagagccgcgttatcgtgaattgaaaaaggctgatttaggattatagaggttcattatgctaacgaataaagtgccagaacaagatgtgcatgacctatttactagggtcgcacctaagtatgatttgatgaataatattgttagtttagggattcaaaagagttggcgtaagaaatttttacggcagttagatttaaataaaaattctatttgcttagatttgtgttgtggtagcgctgattcaactattgatttgactaaaaaagctaaattagtgactggtctagattttaaccaggagatgctgaagattgcccaaaaaaagattcgtcaaaagcagctgcagtccaagataaagttgattgcaggggatgcaatgaatttaccttttgcggccaatagctttgattgtgtaactatttgttttggcctgcgtaatgtccctgacgctgttaagacgattcaggaaagctaccgcgtacttaagccgggcggacaatttgctgttttagaaatgtctcagcccactaatgcattagttaaattgggctggcaagcttattttaaaatttttccgtattttgctaagttgacacacggtaatatcaaggactaccagtatttgtcaaaaacaagtaaagaatttctctcggctgagcaattaaaaaagctacttgagcaaaatggttttactcgagtagcggttactaagttaacttacggtgcaggtgcgattcatttgggacgcaaagactaaagcgttcgattgactaatttacgcgtcatctttttgagcaagacggtcgcattagtttgcggcagttgggctaagttagctaatgcccgattagtgtattgttcagctaaggcatgagtttcttcaatgactgagctgtttagcaaaatcttttggatttgttcgatatcgtttttgctcatttgtcgctttttttcaagtagcggtactaattgctctcgtaattcctttttgctaagagctagcagaataggtagagagtagacgccggtagtcaaatcttctagcgttggcttgtttagctgcttgccgccagtgtaatcaagaatgtcgtcaacaatttgaaaagcaatgcctaaattttcaccaaaggaggctaaagcttgagtagtttgctcatctccattgccaaaatggcttccttcttcggcagctaaacgaaaaagtgcagctgtctttcctttaacattagttaagtagtcgttgaaatcttggcttaggttaaaacgttcagccatttggcctaattcaccagcaagtaaatggtgcattgtgtgagcatttttgatcatgtaatcttgttcggaaatggcgttcaaaattaggtcaaaaaagtgcgtaaaaagcaagtcgccagcgtaaactgcggtgtctttgccaaaacgggcttggatgctaattttaccgcggcgctcgtcagaatcgtcaatgatatcatcatgaattaatgaggccatatgcaaaatttcgattgatgaggcaagttgaataatttgttttgatacagtttcttttttgctagcaatttgagctgacaaaattagtaaactaggccgtaaatatttaccaccgttactagccatttcaaggagtgcatcttgcaagtctgaatatggagtgcggatggttgcctgaattaattgattaacttcttcaagcggtttacgaataagtggatatttttgccaaggttgagagttattcatgatagatttccttataatagagttaacagaatagtgatcctttgaaaggatgtggatcgatgtcattaagtgtatttttagaattaattgagattaaagcaaaaaccgctagtgtcattccctttttcttagggatgtgctacagcgtgtattattatcaccaagttaactggggatttgccctagtcttcttcattgcaatgctactatttaacatggtagtagatatgtttgataactactgtgattattatcacgcagatagcaagaattaccaagagaagactaacattatcgggcgagaaaatatttcacctaatttagttctgggattaattatttcctttagtcttattgcaattttattaggtttgtatctagtcgctaaagtaggcttgcctgtattgtggatgggcttgttctgttttatggttggttatttatattcatttggtccgcatcctatttccagcttgccactaggtgaattgttctctggtttcacaatgggcttcatgattgtactgctcagtgtttatatcaatagttttcaagcttttgattggaactggatcacaatcggtcgtatcttcttattagctttagctgataaattatggatttctaatttaatgctagctaataacttatgcgatgcccaagaggacgaggataatcaccgcaccacaattattcactttattggtaaaaaaggtggcttgattgcttttagtatcaaaaatgttttagcatttttagtaatcttcctcctaccgtttttgggaattgctcctaagacggtttggttaacagtaataattgtaccgttcgtttataagcagaacaagatcttaattggtaaacaagttaagacagagacatttatcacaggagtaaaaacgttgctagttggttcactgacttacttaataacttactttttaggaattctattttagagaggttgaaaattatgaaaacagttgtagttttaggtgctggttttgccggcttgaaaacagttgtcgctttgcaaaagaagttgcgtgaacaagttaagattatcttagttgaccgtaatccataccactacgaaacaattcgcttatatgaagtggctactggtgaaattccctacactgggatgtcatatgaaattaatgatgtaattaatccgaagatgactactgtgattacggatgaagttgaaaaagttaatattgctgataaaacagttgagttaaaggatcatgctccacttaaatatgactattgtgttgttggcttaggctttaccttgagcaatatgggcattaaaggtgtaaccgaaaatgctttgccaatgagcaatgtaaaacaagctgaagctattcgcgaccacctttatgtcgaaatgaaagcttatcgccaagaccatgattctaaacacctgtcagtagtaatttgtggggcaggttttcaagcaattgaattaggaaatgccattgcaaaggttcgcccagaactagctcaaatggctggcgcccaaccagatgaaattaccatcagaatgattgatggttcgccacgtcttttgccaatgttccaaggtaaattgcttgattacgctttaaacacaattaagaaaaataaagtcgaaattattaagccagcttatgttaatgaagtaacctctacctcggttttgtataaaatggctaatgaaaaagacaatgctgagctgcaagaaattaaggcaggtactagaatctggatgatgggctttagtggcagtccagtaattgaggcatctggatttaagaaccgtcgtggtcgggtcatggttggtgatcatttaaccgcgccagaaagtgatgatatctacgtcttaggcgatgtttcaagcgtcatggttcctggtaagaaatggccatatcctaacactggtcaattggctctttcaatggctaactacgctgcaaaagatattaagagcagaattatgggtcaaactagaccggataaatatgcttaccatgacttaggtgtagtagttaacttgggtaattcagaagccgcaggattggcaatggggcatgcttttaaaggatactttgcagcaactcttaagaagattaccattgataagtcggttcttgaaactggtggtattaaagaaacaatggcgattggtcaatttgacttctatcactaaaattgaaaataaaagagaataaaaaatcacttcagtttgatttgatatgaaccccaaatttgggacatattattgaactgctttatttaaaaccatatttcgatattctatcggagtatggttttttagtactgttttaattctttcatgattgtagtaatgaatgtattaggactaaagtgtgaagttgcgccattttatgtcacaccaagaagacctgctattcaccacactatgggtggcttagtaatcgacactaaggctcatgttttaaataaggacggtcaaatcatcgctggtctttattcagcgggtgaaaatgctggtggtatccatgccggtaaccgtttaggaggaaattctttagcagatatctttacctttggtagaattgctgccaatactgcttatgaggataagcatgttaccgatgttattactggcgcttcgcagaaataaagatagagtacgcgtggtgctagttaaatcgttttagttaataaaaaagtccaattagactagactcaagttgtaagtaatttaaatagaaaagagtctgatctaattgaactatctcaagcttaatcgtttttctcaccatttacaagttagttttaatcggttaaatgtgatttgtcgctcgctgtataagctttatgcgcctgatggacttaaacatcgtaaaaatgttgatcagaccaagcttcctaatagttctatcttagcgatgctcatttggcaaactgaaattggaattgaatctcaacgaagattctgtaaattcttcgttggcttatctcattctcgttttaaccgtcgagctcgaatgctcttgcctctaattcgttgtatccgtcagggttggaatcaggaagtaaaggtaggtggagaattattgattatcgacagttttccgattccagtttgtcagcctgttcgcaattatcacgttaagatcttccgtggcatagccgatattggttataaagcgacgaaaaaaatctactattatggcttcaaagtccacgcaatagtgagtgatgatggctatctgcttgactacgcagttactaaggcgtcggtacatgatgcaaaagagacggtagaattgatgatcaatgctcatccaattaaccattatcttttaggagatgaaggctatttaggaaaagacttagcagccaagctaaagcgtatgggatacgtgctttggacaccatatcgtaaaaacatgaggggtgctaaaaagcataatgatcatcagttaatggcaattagaagaacaatcgaaagcgacttttctttgcttagctattacaatgctgagaataatcgagccaggagcttagtaggttttcaacaacggctagaaatagctattttagcttataatatggcatattgtctagaacgatttaactagcaccacgcgtgatagagtataaaaaaatacatatacttttacgcgtggtgctagttaaatcgttttagttaataaaaaagtccaatcggattagactcaagttgtaagtaaattaaatagaaaagagtctgatctaattgaactacctcaagcttaatcgtttctctcaccatttacaagttagttttagtcgtttaaatgtaatttgtcgttcactatataatctttatgcgcctgataagcttacgcatcgaaaaaacattgatcaaacaaagctttccgacagctccatcttagcgatgctcatttggcaaactgaaattggaattgaatcccaaagaagattctgtaaattttttgttggcttatctcattctcgctttaatcgtcgagccaagatgcttttgcctttaattcgctgcatccgtcaagcttggaatcaagaggtaaaggttgctggagaatttttaattattgacagttttcctgttccagtttgtcagcctgttcgtaattatcgtgttaagatcttccgtgacatagccgatattggctataaagcaaccaagaaagtctattattatggtttcaaggtgcacgcgctagtaagcgatgatggctatttgcttgactacgcagtcactaaagcatcagtgcatgatgccaaagaaacgacagaattgatgattaatgctcatccaattaaccattatcttttaggcgatgaaggctacttaggaaaagacttagctgccgagttaaaaggtatgggctatgtcctttggacaccatatcgaaaaaacatgaaaggtgctaaaaaacataataatcatcaactgatggcaattagaagaacaattgaaagcgacttttctttgctcagttactataacgctgaaaataaccgagcaaggagcttagctggctttcagcagcggctagaaatagccattttagcttataatatggcatattgcctagaacgatttaactagcaccacgcgtagatatatcaatttaaatattggtatgtctgtatttctatttggagtcattttttccttaccttcgaataaaaacccatgatttctaattcttactaacaaaaataatagtaacttttctaacttcccaaaaaattttgcgacttttttgcgtaataaataatagaggataaatatcctcaaattatttaaggaggactttgcatgagcaaagagaaagaactaaatgtgtctgaagcattaggttttacggatgatttgatgtttcagaatgttatgagagatccagagatctatcgtatgtccttgaatgaggttctaccacatttggacattcaagatatcactgtatgcacgcaagaaaggattgcttttaaccaagaagagaaagtttcgattcttgatgtcctgattacggatagcagaggcaggcgttacaatgtggaaatgcaggtcgcgcataaagcagacatggataaacgagccaggcaatacctgttcaagatgatggaagatggctttttacgacgaaaacaagaatatggcgagctgcacgctgcatatgtaatttttattctgccgtttgatcccaaaggaaaaagcttgaagcgatatacttttgtttatactgctaaggaagacccatcagttgaattaaatgacgattctgcgataatatatttaaacacaaagggaacaaaaggcaagatcagacctgagcttgatgacctttatcgcatgattgaaggcaagccaacttcaaatggaaaactcgtcagtcgaattaaaaagtcgatgaacaattatcgtagaaccgaagaatggaggcaacacgtcatgaacacagaagaagtagcagaagcagcaaagcagcttggcatggaagaaggcatacatgaggcaactgttgcagcaatccataaaacgattaacatgcttagaaggatgaagcgcagtcccaagcaaatcttgcaagaattagaacaagattatggcaatgaattttctgaagaagaactagcagactttgtgaaaaacgcctagtcgataagatataatgatagctgtgaagctatcattttttagataacgggggcttgatcatgaataatcctgaagaattacaacattttttagatgttctgctaaaagagagtaactttaccagagcagctaaagaattatatatttcccagccttatttaacgcagctaattggacgaattgagaaaaaattaggcactaagatcatcaaccgagatgagagaccctatacgttaactcctgcaggtctaatttactatcaatatttggagaatgtttcatataataagcagcaattagggcgcaagctggaggcatatactcatcctgaccaacagataattaaaatcggcattttggagagcttaggtacatatttattgccagaaattttgccgcaatttttgcaagaaaaccccaacgtcaagattcagctatttgaaaatttccccagagaaaatgaaagaagactgcttaatggcgagctggattgttatattggtcagacgccagaagcacttgactcgagtttagatgtggttgcgggtggcgaggaacgctattacgtagtgatttcgccagcctcaccatattaccaagcaggaaagtttatcttaaattcggatgaacttgatctaaaagaggtactgcaggagcctttagtgttgagttcacctggttcagctatccggcatcaagttaatggcttatttcagagattaagactcgaaaaaaatattgtgatggagtctaatagtattattactgcaactaacttggcaattcacggcgtgggtattaccatttcttcggcaagtattatcagaagaatggaacaaacgccaattaacttgttgccactagatcgaaagttaatggatgttgtctttttcattactagcaaaagcggggaaaagtcgccagcgttagaaaacctaatttcaatttttcaaaagacgcatttacaagcaaaaataggataaagaaaaaggcatcatgcgatgccttttaaattgctttgatttctattgttttcgtttcatgtcgatcatcttcggctcaatgtagaagtgatagaggaaggaataaccaagcagtacaaaggtaattccttcaatccaaccgccgaatacatcagatggatagtgcacgtggacgaaaattctggtgtaaccaatcatcagtgggaataaagcccaaataataatcaataaagtcttccagaatttgcttctcactaaaagaatggttaggataatcaaaacaccaaatagcgccgcgctaccaactgagtgccccgatggaaaactataaccatccgcataaactaagtgcttgaccgttggacgctgccgcattgctgcgtgtttgataatccaattatagccattagcacagatcatgacaccagcggtaaaccaagcgtatgcatattgcttaaagaccagtaaaactatgaaaacaatgattgtttcaattgtgatcacgcttgtattgccgagattagtaaaatctttagcaaaagcgacattagctggattattgttgcaaacaatgttgaccacagcattatcaaaattgtgaataaattgtgagccggatgaaaccagtgcggcccagacagcataaataaccacgaagcagataccaggtattaaggtgtccttaggtggtcgtttcgtattaatcaaaaaagtactcccctcttgaaatttatagcatttgtggtaaattataatcattatctataagaaaataaaggtcgagaagtagtaacaaggatatttttttcagagagagactggttggtgcgaagtcttagaataaaattgtgaactcgtctcttaataaaacctagcgttgccatccgcgttaaggagcaattaagtgtcacaattttgtgaaacttaggtggtaccgcgatgattcgtcctatgattttttcatagggcgttttttgatagtaaaggagagtttatcttgtataaccacaaagtagttgaaaagaaatggcaagattattggtcaaagcatgatacctttaagacaggtactgaccctgataagaagaattattatgcattggacatgttcccattcccatctggtaagggacttcacgtaggtcacccagagggctataccgcaactgatattgttgcaagaatgaagcgtgcacaaggctataatgtgcttcacccaatgggctgggatgcatttggtttaccaactgaacaatatgcattgaagactggtgaagatccagaagttgttactaagaacaacattgctaactttaagcgtcaattgaacaagttgggcttctcatatgattgggaccgtgaagtaaccacttcagatccaaattactacaagtggacgcaatgggtttttgaacaaatgtataaaaagggcttggcatatgaagctgaagttcctgttaactggtcaccagacttaggtactgttgtggctaatgaagaagttatcgatggtaaaactgaacgtggtggctacccagtatatcgtaagaatatgcgtcaatggatgcttaagatgactgcatatgccgatcgcttattagaagaccttgatgatttggattggccagaacccgttaaggaaatgcagcgtaactggattggtcgttctgaaggtgcgcaagttactttcaaggtaaaagacagcgacaagacttttgatgtctttactactcgtcctgatactttatttggtgttagctatacagttcttgcaccagaaagcaagcttgttcaagaaattaccacacctgaacaaaaagaagcagttgatgcttacattaagaaaattgaatctaagtctgatcttgaaagaactgatttgaacaaagataaaactggtgtcttcactggtgcctatgcaattaacccagttaatggcaaggaagtgccaatttggatttctgactacgttttagctagctacggcactggtgcagttatggctgttccagctcatgatgatcgtgactatgcttttgctactaagtttggtttgccagttaacccagttattgaaggtggcgatattgaaaaggaagccttcacaggtaatggcaagcacttcaattctgagttcttagacggcttggataatgaagaagctaaaaagcgcatgattgaatggcttgaagaccataactgtggtaagaagaaggttaactacaagttgcgtgactgggacttcagccgtcaacgttactggggtgaaccaattccagttattcactgggaagatggaaccacttcattagttccggaagatcaattaccacttcgcttgccacatgcaactgacattaagccatctggtaccccggaaagtccacttgctgacttgactgactgggtaaatgttgttgacgaaaacggtagaaaaggtaagcgtgaaaccaacacgatgcctaactgggctggttctagctggtactacttgcgttacgttgatccacataatgataaggaattagctgactacgatttgcttaaaaagtggcttccagttgatctttacatcggtggtgcggaacacgctgtgcgtcaccttctttatgcaagattctggcacaaggttctttacgatttgggtgttgtgccaactaaggaaccattccagaagctttacaaccaaggcttaatcttgaagaatcacgaaaagatgtctaagtctaagggtaatgtagttaaccctgatgaggtgatcgatgaatatggtgcagattcacttagaatgtacgaaatgttcatgggtccacttgatgcatcaattgactgggatgacaatggtcctgcttcaactaagaagttcttggaccgtgtgtggcgcctctttgtaaacgatcttgatttgaaggccattccacaagaaagaatcgttgataagaatgatggtgaacttgacaaggtttatgcagaaacagtcaagaaggtaactgaagactttgaatcattacactttaacactgcaattagtcaaatgatggtcttcatgaatgctgctcaaaaggctaagaccattccacgggaatacgcagaaggctttgttaagcttttagctccagtggctccacatatgatggaagaaatttggcaagtctttggtcatgatgaatcaattacttacgctaagtggccaacttatgatccagctaagttagttgagtcaactgtagaaattatggttcaagttaacggtaagcttcgtggtaagttccaagctcctaaagacgctgcaaaagatgacttgcaaaagcaagcaatggaaattgaacacgtaaagaagttcttggaaggcaaggacgttaagaaagttatcgttgtgccaaacaagattgtcaatattgttgctaaataagttagattttcctaaaaaataataagaatacttattatttagatttattgaattgattagttgagacttttattgggaaaattttaatggaagaaaataacttaaatagcaaagatacacaaaatacttttctaaaaggttccgcatggatgacctttggctcaattgcctcgagaattttgggtgctttgtatattattccgtggtatgcctggatgggctcctacggcaatattgccaatgctttgactgcgcgtagttataacatttatacaatttttatcttaatctcgacagccggaattccaggagcaattgctaagcaggtagctaagtataatgcactaaacgaatatgggattggccgcaaattatttcgcaaaggcttaattttaatgaccgttttgggtattgtctcagctgcgatcatgtattttgcttcgccgcttttagcttcaaatgggagtcaaagtgatccaagacaggttgcagttatgcgtagcttgtcttatgcgattttaattattccaattttgagtatcatgcgaggctatttccaaggttatgccgatatgatgccaagtgcgatgtcacagtttgttgaacagtttgcccgggtagtctggatgttgctaacggcgtttgtaattatgaaactgcaacatggttcatatgttcatgcagttattcagtcaaacttagcggctgcagttggtgctttatttggaattggcttattaatttggtttttgttttctagaagaaaacaactagattatttggttgcccattctaataatcgcttgcgggtctcaacgactgaattatttggtgaaattattgcacaagcaattcctttcattattattgattcaggaattaccttattttcattggttgaccaatataccttccacccgatgattgccagtctagttcatgctagttcagatacaattgaggactggtatgccttgtttggtttgaatgctaataagttaatcatgattattgtttcgctggccagtgcaatggcggtaaccgcgattccacttttatcagcggcgcatactaggggagactataagagcatttcaaagcagattgctaatacgatggacctatttttatttgtaatgattccagctgcttttgggatggcagccatcagtaggccaatttatacagttttctatggtccagatctattggggagcaacgtactatatctgtcgtcatttaccgcgattagtttaggattatttacggtgctgatggcgattttgcaaggtctttcgggaaatggactggctatcaagtacctggttttaggattgattttaaaagggatcctgcaatatccaatgattttcctatttaaggtatacggtccgctggttgctactaatttaggtttattaattattgtggcactttctttaaaacatttggaagtgcagtatgattttaatttgaatcgaactagtagaaggctggctggagttacagcattttcagttggcatgttccttgtggttaaattatgtgaaatgggactaggcaagtttctcaatcctgatcatagatttaatgcattggtgctagtgattgtagctgtaggtgctggggttgtcttttatggcttggtgacattgaagacagggttagtccaaagcgtcttaggtagtaaggtagaaagtattttagttagactacatatggataaataaaagaaaatcaaactgttgtgatggcagtttgatttttttgttataaaaaattgcggctctttgtcaaatcttactgataaggtgtcaagtctaatttttcctggtagttgagtaaatttttggccgggggatggcttacttgagtaagtttttgtgcaatttctaagtgaatcaaccctaattgtcaaaaaactgccactccctcttgcaaagacgataattagtgttattatataatgcataagaaacgcaagaaatgtgtataaaaacaattatttttagcaaaggaggcaaaaagcatgattaatctgactgttaatacaatcaggcttagcggtgtcgctgcaagagcaaaccgcgtcatgttttaactgtcctttagacaaagtgaatcaaagataatttaacagcacagtattaagtacacccggtttatcggcggcatcgttaactgaagattttttgttatgcgtgttagctaatgaggtattaagatgaacaagggtaagactttaatgactggtgctgttatttttatgtgcgggagcatgctggcggcctgcggcaagagccaaggagcatctgtcaagcagaatttaaactggatgaccagtgcgaaaatcatcaccatggacccatccaaagccaccgacaccacgtccttccagcagattgaaaatacgactgaagggctctaccagctgggcaaagacagcaagccggttaaggtactggtcaagaagacgactgtcagcaaagacggtctgacctggacttttgaccttaagaaggggactaaatggtctaatggcgaaaccgtaactgccaaggactttgtctattcctggaagcggacggtgaaccccaagacagctagccaatacagctacattttctctgggattaaaaatgccgaccagatcgttgctggtaaaaagaaggccgatacgctgggcgtgaaagccgctggcaaatacaagctgcaggttagtctggaacataagattccatacttcaagcttttgatggccttctcagtctttttcccagaaaaccagaccgcagttgaaaagtatggctcaaagtacggtacgtcatcaaaaacgaccgtttataacgggccattcttgcaaaagggctggacgggctccaacttgtcctggaccatgttcaagaacaagaactactggaacgccaaagccgttaagctgcaaagcatccactttgccgtggaaaaatctccgtcaacggcctactacctctaccaagatggcaagctggacacggcaagcctgagctcacaagcctccaagaacctgcaaaagtcaccagactatgttgtaagaaagaccaacgggacgacttacttccaatttaacctgaaaatgaagaagttccagagcaccaagatgcgtcaagccatctccatggccctagacagaaacgccttagccaagaccttgggcggcggctacacgggctctaagaactttacggcagctggcatgaccaaggtgggtgacaaggattttaccgacctctctcaaaccaaggaaagcttgctagtaacgggccaccacaagcagctggcccaaagctactttaaggaaaggttgaaggaacttggcttaaagaagctgtcctttacggtgattacggcacacgtccaagtccatcggcgaatacttccagagtgctcttgaatcaacttttggcaagcaaatcgacgtcaaggtgcaaagcctgccaaccaagtcccaatttgccaagatggactctggtaactttgaagccacgatcagcggctggaatgcggactttgccgaccaaatttccttcctggactgcatgacctctactaatggctacaactcaggcaagtggatgaagctgctggcaaaggctgaaaacaccttgctggttgatcagcggctcttactacttcgaacacgtctacattgccaagtaagccagtaaaaaatgtattatcatgctaggtattatgtagtagaaagtgaagaataaagcgtaaattgctataattaagatagaaataagggaaaatcttaattagtgaaggagcgaaagataatgaaagactcaaattcaccaatttacaacatttggatggtggttctgctggttgccgcatatgtctggccaatctttggcttagcaccagccatctacctctttatcaagcgcaaggatgagaatctggtccctttgaagaattggattactctagccttgatctggcagattgttttgtggctgctcttgattttggttgtcgtctccttctgggtcggcgcctttgcggtcaaccacggttaactaaataactaattgaatagctagataaaagtcagtggatgccactggctttttgtctgcttaagcaaatgtcataactatatcactatttatagccttgaatagatttaatcggttacataatgcatcacgcaggtgatatctcacaaaaaattaacaaaagcatcaggttcaaagattgttaagccgatgttaaatagaactagcaagggtgaaagcggtacatttttttctttgttaagctaatgtaaactaagaaaaataacgttagaatattaaccgattttcgaaaaatggtaaagatttttccaaaatccggccagaatttaaacaaagttaagtattttactttgatttaacatttccccctgaatgtatttaacctccattaattactatttacttagtaagaattcaaggaggataattatgttaggcaagaaaactagagtagtggttatcgcacttgctctactggctatagtcgtcggctgcgttgttggcagttcaaaggcagacaccaagggtgtctctgggactgttaacgctgcggggtcttcagccctgttgccgctagtccaaagcgcagctaaatcattcatggatgaaaatccagacagcgtgatcaacaccaacggtggtgggtcaggccaaggtttacaacaagtctcagatggaaccatcgacatcggtgactctgacttgttcgcagaagaaaaattagacaagaagtccgcatccaagctggttgaccaccaagtggccatcaccgcgattgccccaatcgtcaacaaggacgccggggttaagagcttaaccacccagcaattgatcgatgtttacactggcaaggttaccaactggaaccaagttggcggcaatgactgcaagattgttttgatctcacgtcctgcttcttcaggtacccgggcaacttttgaacaatatgctttaaacaagactgccagtcgttcaaaccaatcactggaaactgacgactccggtactttgatccaaatgattcaaagcgttgaaggggctgtcggctacgttgccttatcatacttgactggtaacccagacgtaactgcagttgccatcaacggcgttaagccaactctggacaacgtttacaacggctcatacaaggtttggaactacgagcacatgtacaccaagggtcaaccaaagaaggctgctgttaaggcctttttaaagaagatgttaagtaaagaatacgaatcaaaggttgaaggcatgggctacggtgttgcttctaagctttcagacaaggctaagaaagaacacaagtaaaaggagagtgatttttcatggacaaggtagttcaaaaagccatcgctagcgataagcgctggcgggcagtatacattgcttgcgggctcttgattgttgctttgacgctcttgatgggggcattcctgctctaccaaggtagtcaaacctttatcaaggctcaccacagcatctgggaattcctgtttaccagcgactgggcaccgcttgacaagaccggcctgtttggcgggaaagtcggtgcagcagtttacatcgtaggttctcttgaaacctgtttgctggccctggttatctgcttgccatttgctatcggctcagcagtttacatgacggaaatctcaccaaagatcggtgaaaagtacttccgtccagctacggaaatctacgtttcaattccatccgttgtttatggttggtttgggatgaccaagctggttccattgattaaaaatattttccatccagccatgggtgggtactcagttttggccgcatccattgttttggccatcatgatcttcccaaccatcaccgcggtttccgctgacgccattaagtcagtgccaatgagctaccgtgaaggtgcttacggtttaggcgcaacccgctggcaagtaatcggcaaagttgttttgccagcagcttcaggcggcatcttgaccggggtgatccttggcttggccagagcgatcggtgaagccttagccgtagccatggttatcggtaagactcgctcatttgcggcaaaccttttgtcaccaaccagcaacttgacgagtgccatcgcagccgacatgggtaacactgcccaaggcggggaatacaacctggctctgtggaccatggcgctgctcttgttcatcatctcaattgtcttgattgtgctcattcacaaactggctaacggaaagaaggataaataatgaaccgtgctaagaaaaaagatcggtttatgaccggcgtcttttacgccatcggctggctgatgctagcattcttgctgtatttgacatttaccattatctttgatggcttgaagggctttagcccagacttcttaggggctgccggcaacgggatcttcaaccaattctttaacactctttacttagttttcctttcgctcttagtttccgtgccaatcgggatcggggctggggtttacctggctgaatacgccaaggaaggcaagctcttgaccatgctggaagtaagtatcgaatcactttcttctctgccatccatcgtaatcggtttgttcggctacctggccttcatcatgtggacgggaatgagctggaacatcgtggccggggccttgacgatctcaattttgtcaattcctttgatcactactgaaaccaacaatgcaattcgtgccttgccaattgaatacaaggaaggttctctaggtttaggtgcaaccaagtcagaaaccattagaaaagtcttgattccagctgctatgccgcaaatcttgactggggtcatcatggccgctgggcgtgggtttggtgaagccgccgctttgctgtacacgtctggtcaatccacttacatcaactggcacaacttctggaagattacttcacctacttcacctttgaatccattcagaagtggtgaaactctttcactgcacatctgggtcatgagaactgaaggggctttgaaccctaaggcaacccaaattgccaactttacttcagctgttttagtagtactcgcactgctctttactttagttacctgccgcatttcagacaagatgcgtaagcgcaataacggaggaaattaataatggaagacaaaattactatcgaaaacttgaacctttactacagtgatttccacgccttgcatgaccttaacatgcacattccaaagaatgaaatcacggctttcatcgggccatctggttgtggtaagtctactttgcttcgctgcttgaaccggatgaacgacctggttgaaggctgccggattgacggttcagttaagttagatggtaccgacatttatggcaatgaccttgacgtcactgttttgagacagagagtcggcatggtcttccaaagaccaaatccattcccaatgagcgtttacgacaacgttgcttacggtcccaagatccacggcgtaaccgacaagcaagaacttgacgaaatcgttgaaacctcattaaagcaagctgctatctgggatgacttgaaggaccgtttgaacaagtctgctttgggtctgtctggtggtcagcaacaacgtctttgcatcgctcgtgccttggctgttaagccagaagtcttgctgatggacgaaccaaccagtgcccttgacccaatttcaacttcaaagattgaagaattggctctgcaactgaagaaggactacaccatcgttatcgttacccacaacatgcaacaagccgtgagaatttctgacaagactggcttcttcttgctgggtgacctggtagaattcggtgaaactgaccaactcttctccatgcctaaggatgaaagaactgaaagatacattactggtcgtttcggttaaagaccagtaataattagatagagtaagaaaggcagaaacaatgactagatcaagatttgatgaagaattggacaacttgcaaaagtccatggaagacatcggcaagctgtgccaggaagccattttggaagcaaccaacaccttgtttacgggcgactaccataaagctgaagactcagtcaacttgcaccgccgcatccacaagagcgaacggaaaattgaagacagctgcttgcgcctgttgatggagcagcagccagttgcgactgacttgcgggtgatcagttcttctttgaaggccgtttacgacctggaaagaattggggaaatctctgctgatattgcagaactcgtgttaaatgaacacctgtccatcgccaatgaccagctgaaccttaagtccatggtgcaaacctcaaccagcatggttgatgatgccgtaaccgccttgtccaccaagaatctggaactggcgcaagcggttatcgaccgcgacgacattgttgacgatgactttgaccatgcccgagaaatcctgatcaacaacttcagcaaggatggcaatccagaatacctgatcaacctgatgatggttgccaagtacttggaaaagatcggtgaccacgcggtcaacgttgctaagtggaccaagtttgtggcaactggcaaggccggaagataagtcttggaaagtttgctaaattaatattcttcctgatctatctgcatagcaaatgtttctaagctataattagagtagctatttgcagatagattagggagaatttttttatgactgaaatatggtgtgtggaagacgacgaaagcattcgcgaaatcgaaatgtatacgctggagtcgatgaactttaaggtgcgtggctttgaagacgggacgacttttgtcaaggccctggcggaaaagcatccagatctggtcatcttggacctgatgctgccagatgaagatgggagcgatattttgaaaaagctccgtggcaactcgtcaactgaagaattgccggtgatcatcgctagtgctaagacagccgaatatgacaaggtgaagaacctggattctggggctgacgattacttgaccaagccttttggcatgatggaaatggtctcccgggtcaaggcggtcctgcgccggaccaaccacaagaaagaagacaagatcgagaaagacgggatcaagatcctgctcaagcggcatgaggtttatgtcgatggtcaggaaatcgagctgaccttgaaagagtacggcctcttgaagctcttgatcacccatccagggaccgttttttcccgagaagaaattatggatcaaatttgggaaacgggcttttacggtgaaacgcgcacggtggacgttcacgtaagaaccttgagacaaacattgagtgaggctggtagccatatcgaaacggtgcgcggggtcggttatcgctaccatgaagggaattaatgtttaaaaaaatatttcgggcagtctttttatcaacggcagtcatgctggtctgctcggtggttttgagtgcgctttttttaggcatcgactatgatcacaatgaggtcaacaccttggcttcgcaggccgatttggcagccagcggggtcaacaatgggggaaggaagtacttaacccagctaaaaggagaaaattaccagattacctggatcaatgctaaaggcaaggtactctacgacaacgaggaaaacccagccaagatgggcaaccacgctaagcgcaaagaagttgctgaagccatgaaaaagggcgaagggcaaagcgagcgctacagcacgaccctgtcgacggttacgatgtactatgccaaaaagctgaaagacggcggcgttattcgggtggcggttacgcggaattcgatctggatgaccatcttgcaattgctgacgctgatgctgatcatcttgctgatcgccgtgattgcttcttggttcgtagctaagatgatctcgcagtccatcgtcaagccgctgaaccagttagacctggaccagccgcttgaaagcaagagctatgaagaaatcaagccgctgttaacccggcttgacagtcaaaacaagcagattgctgaccaaatggagcagctccaccaccgggagaaggagttcaagacggtcaccgatgccatgcaagaaggcctgatcttgatagacctgaacgaccaggtcctcttgtccaatccggcggtagtatcgctcttaggatcaaagtcttctgaagttttgccagatgatgttaaaaagatcatcgatcaagacaagcggaccgtccacaccgaagggatcgtggaaagagaagggcgcaacattcaaattagtgccagtccgattttttcacggaaggtcttaaaagggacttcgatcttggtcgttgacgtcacagaagaataccatgaagagcaggtccggcgcgaattcacggccaatgtgtcccatgaattgaagacgccgctgcagtccatcatggggtcagcggagcttttggaaaacaacctggtcaaggaagacgatcggccagccttttaccggaagatccatgaatcttcagctcagctcttgaccttgatcgatgacattatccggctgtctcacctggacgaaaatccggaatttgaagaggtccggatgaacctgaagagtccggtgaccgaggcgatcgaagccttgcaggcgtcagctgacaagcacgagattgagctgaaggcggctttggccgatacagaaatcaaggccaacttccgcttggtttatgaaattgcctacaacctgatcgacaacgccattcgctacaacaatcctggcggccaggtcaagattgcggtcaaggaagtgcgggggcaagctattttgcgggtttctgacacggggatcgggattccgcttgaagcgcaaaaccgcatctttgaacggttctaccgagtcgacaagtcccacaaccgcaagactggcgggacgggacttggtctgtccatcgtcaagcacgcagtacagcagtgccatgggacgatccgccttgaaagtgaactgggcaagggctcaacctttaccgtggtcttcccagctttaaagcatgaagacaaattatacagccaaaattgcttatttgatctatgataaaggtgtcgaaagaaaataagagctctatttaaataacatagacataatcatgggctaagtgtatataaagtgtaatttagaactatacaatatatacgtaaaatcttatgattaaaggtgaacagatattatagccactttttttaggattcgattaatgtaaaaattacacaatgaattaataaaaagcgccatataataagcaaaaaaagtcatttaaataactaaaataaactgagacctaaaagttgagactgtaaaatagtttgtgtaaggatgaatgattccttaaatttatttctttaaacattagaaaaaggagttcctttctcgtatgattggtttgaacaaaaaaaacacatacagaaagaagaactccttcatgaatgattttaccaaagattttgctcaagctctattcaatccagacaaaataaatgatttattgcgcaaagaactacaacaggctgttaataacttgctagaagctgaattgactgcctttctgggctatgatccctatgccagaaatggctggaatactggcaactctagaaatggtgcttatttccgcaaagttgatacgcaatttggcccaattgaagtgcaagtgcctcgggatcgcaacggtcaatttcatcagcacacgctgcctgactacaagcagcactcggatatcttggaaagcatgattatcaagctttactccaagggcgtgaccaccagggaaatagccgatctaattgaaaagatgtatggcagccattacagtccagctcaggtatcaaatatttccaagcagatgattccaaaggttgaggcttaccacaaacgcaagctaagcgacaagtttttctgcgtctatttggatgcgacataccttcctttgcgccgagaaacatttgagcgcgaagcagtctatattgccattggcatcaagcctaatgggcacaaggaggtcattgactactgcattgcgcctagcgagaacattgaagtctggacagatatgcttcaaaacatgaaatcccgaggcttaaagcaagttgagctttttctttctgatggtgttgttggcatgaaaacagccttagctcagacttatccaaaagctcattttcaacgctgtttagttcatgtcatgcgtaatatctgcgctaaagtacgcgtcgacgatcgtgaaaagatcatgaacgaattcaaacaggtgcatcaacagacaaacaaagaagaagccacagctgtcctgcatgacttctataccaaatggggcaaggtttacagccatgttatcagaagcttgaaagacatagaaccagatctgccggtcttttataactatcccaagcagatcagagcttcaatttattcgactaacatgattgaatcatttaacaatgtgatcaagcgcaaagctaagcctaaggcagagtttccaactgaacagtcgcttgatgcttttattggtattcaggcaatgagctacaatgaccgttatttcaatcgaattcataaaggctttggtcaggttcaggacaccttagaatcctactttgattaaataaataattaaaaaatcaatttacgagaaagaactatttacacaaaagatttgacagtttctaaaagttagacacttttaggtctttttctacgtaaagtcaagcataataagaagtttggcttcattttttgtttaaatttcaacttaaacatcttttagtgtcgatttatttttttagttagacacgacaaataagcccagatccatatctgatttttgggcttagcgttataatgtacttgatcaattaattacgactaaagtctttttgattatgtgtggctacgttgtaatcatatggttgatcattgataatcagggcataaatggttctgattagtttatgaattgaagcaatagctatctttttgaaccctttggtttgagaggatagctttttgctttcataataatctgctatatgacacggatttgtcttagctgcattatcaatttgtccaatagctcgataaagcaacttacgtgcgactgcattgccatgtttagtaatacttaaattagagtccatttctcctgactgatatctgcctggatcaattccgataaaagcattgattttattaggattactaaatctgcgtaaatctcctaactctgctaaaactctgacagcagtggtctgtgcaaagcctggaatgctttctaggttttctaaatcatgattaggcaaagacttcgctaacttaaccattcttgcgattaaattttctctttgatcacttaaattaagcaatctgtgtgcataatactgcacttgctcgacttctatgctagagcaagatacaactggataagcttgataagctaattcaattaatttatctgcagtccttagagcgtgtttaaaagcaatcccctttaagctcattaaccagttaataagctgttttttatcttctcttcttactaagtcacaatgaggatatcgcacaactatttgccagtaatttttacctttagcagaagaaaataaattttcaatttcaggaaaagtcgattgtagagcttggtgaagtcgatttttagctattaccaagtcacttgtcagctggtcatagaagcggctcaaagcattaagctgcttataagtttgggattcgctttgattaaccggatggcgataaagtctttgaattaaagctaaatgataagcatcagttttatcggtcttgttgtagcgtagccccatattcatctcttttttggctttaagcggattaataacaacatattcatagccgtagtcttcaagaaaagcctgcagtctgcgtgaataaacaccggtagcttcaaaaataatttgcggatgtttagaaaaagcggttaattcatgaagcaattgaataaaaccaggacgattattagtaatggttagttcatttttgctttcaccaattagttcacaaacagtagaagtagacttgcttacatcaattccaaaagtaacttgcataataaaaacctccaaaacttagtagtaaaacgtatttacttaagaaatcagatctaattttctaaactcgacatctagtgtccacattcttcgaagagactattgaaaacttaagtaaaactgccagtttattatgcgacatcaagtgtctaaagacctcagggcatatcgttttaccactactttaattctacaaaagaataaaaatagtgaatcaattatcccgtcggataactaattcactatttagcttagaatgtttactatgtctaaatttaataaagaacaaaaaatagaaatttatcataaatggaaagatgaaaatatctcaatcagtcaattggctaaagcgtacagaatgaatctagctaatttagactatatgcttagattaattgatatgcatggaatagaaattttaactactaaaaaccaaagctattccaaagagtttaagcagcgaactattgaacaagcaatctttggcaataaaccatacttacagctgtctttggaactggggtttaaaagtattggcatgcttaacaattggattagagaatataagaaaaacgggtataatgtcattatcaaacagaaaggacgccctgcccgtgaccaaagaaaagcagaaatctcgcaagaaactggagaaagagatccagcagctgaaagaagaaaacttgcgattgcgtattgtgaacgaatacgtaaaaaaactaagtgccttggaccaagaagatcagaagaaatagctagggtgattacggatctaaggcaagaattcaaagttagtttaaattatgtattagctgcgattgcagagcaccctgagctacctataattgccagaagctcatactacaagattatcaaacgacagcccgtcaagcctaaacggtcaaagcttattgctagaatccatgagatttttaatcatcatcaaggccgctatggatatcgcagagtagctttgcagttaatcagagagggctggaaagttacggagaaaaccgttcgctattggatgcataaattaggtcttaaaggcatcaggcgcaataagcgcaaatattcaagctataaaggtactattggcaaaatagctccaaatttaattcatcgtgatttcttcgcagccctgcctaacacaaaatggtatactgatatcactgaatttcatcttaataatgaaaagctttatttatcgcctattctagacggctgcggtggcgatatagtttcttatactatctccaaacatccagatatagatttagtaatgacaatgcttgacaaggcttttgccaaagaaacagctcttaataactgcatttttgatactgatcagggctgtcagtatcaaagccctcgttatcagcgagctttaaaactccatggtattactcaaagcatgtccagaaagggcaactccatggatgatgggctaatggagaacttctttggcctgctcaaaactgaaatgttctatgatcaagaatacaagtatcataatcttcaagaattaactcaagcaatcgaggaatatatcgaatactataacaacgaaaggataaagagcagattaaaaggcttaaccccgaaagagtatcgaagtcaagcctctattaatccaatattttaattgtctactttttacgtctcagtacaaaaattatagagccggttttttagtactgttttaattctatcatgattgtagtaatgaatgtattccttgattgcttgttctaattcacccatggttttgaatgtcttttcaaagccatagaacatttttcgtttaagaatgccaaagaagccctccattaagccatcatctaatgaatttcctttacgtgacatagactgggaaacaccatgatttttaagccaagcttggaaaacagcgtgctgatattgccagccctgatcagtatgaaaaattaacccattgagtgcaggatgcttttgataagcttgatccagcatgtccattacttgttttagtaccggatgacgatttaatgtataagcaacaatctcttgcgtacatccatccataataggcgacagataaagcttctctccattaaggtgaaattcagtaatatctgagtaccaatgtctatcaggaataattgctttaaaatttcgtttaattaaattgggcttgatttttccaacagtccctttgtagcttgaatatttaaatctgcgtctaattgcaatggcatatagatgcatcttggtcattaatcgtttaacacgtttatgattaactataatgccttcacgtcgcaattgggcagtaattctacgatagccatatctatgcttgtgctcctcaaatatttctttgatccgttccataatcttttcgttttttaaatctttatcatctttagttaaagtgtagtaataattactgcgtgataaatgcggaagatcaggattggagttaatcgtatcaagcacaaacttaacggttacgtggagttcttgccttagttgcgtaaccgcagaaactatctcttgtgctgttggttttcggttcttggggagactaaggcgctcaatttttttacaaattcgttctcgacagtaagtcttaagttcttctgtttgaggtcttttatttgcttctgaagctcttgaatctgtttgtctttgtccttcatgggtaggtctgcctttcttgtgattaatgacattatacccgtcttctttatatttgcgaatccaattgtgaagcataccttggctgggcagtcctaaatccaatgatacctgacgagccgtttcatgatcataaataactcttttgatggctttctctttaaattcaactgagtaatctttatagctattatcaagaatttctatcccatgacgttctattaaggcaatcagataaaacaaatttgtacgatttaccccatattccttagcagctaggttagctgatatattataatttttccaattattgtaaatatcaattttgtcttgtttggataatttagtcataataaaaacctcgaaattcttgtccgaatttcggggttcatatcatttgtttctgtagtgccttttttataaatatcaataaattttaggagtgtaataagattttagaattaattatgttcaactgctgttaacgtaatgactccaattaattcaagtgccaaaaatgtaattccaaggatagtaatcatagtgcccatctccttatctaggagataaataattagaatatttatcttttaattcaatcattgcttacactgttactgtaccacataattgcgtattatgaaagcgattacattaaattgggagaaaaaagttgacctccgaagaaatcaacttgtgcccctgccaaggacctatattatagcattcatttattctgcatgatcatcctttttctcagttgagtcaggattttgatcgtcagacttggtgaagtcaccattcatggtattaggacgaccagtttgataatcaactgtgtgcttttcagccttaggtgcgctttgaccaggttcaggcataaccatagcagcaataatatataaggcaacgccaggaaatacacctgtgaataatatcaatgcagcaccgatgattctaacccaagcaggatctagatcaaagtagttagcaataccgcccaaaacgccagctaaaattttattttgtgattttgtaagtcttttttgcatgataatcaactcgtttctaactgttctatctcttttacatatattatacagcaaaggcatgaaaaaagtgttgattgctcaacacttacacataattatgatgcccgctaaaggattcgaaccttcacttagtcacctaaacagcgacctgaacgctgcgcgtctgccaattccgccaagcgggcatttttattagctacatgaataataataccaaatatttggtaaaatgtaagcataaaatactttaattatacaaaaggatggaatttcatgttttttagtaaaaaaataaaacgtgtagcaattaccacgattgctgcagtatcaattttttcttgtggtgcggtatttgcaactataccagttagcgcagatacaactagtagctatcaagctgatcaagttaaactaaatgtaaagtcagcaattgcaattgatagtgattcaggtcaaattttgtatgccaaaaatgcgactaaaactttgccaattgcttcgatgactaaattagtaacagtttatttaactctgcaagcaataaaaaatcataagctttcatgggatcagaaagtaaagccaacggctccgatagtaaaggtagctaataatgcagaatattcgaatgtaccattaaaactaggacattcgtatacgataagacaactttatcaagcaaccttaattgaatcagctaatggtgctgctatgctacttggtcaaacaattgctggctcacaaaaggcatttatcgatcaaatgcgagctcaagtaaaaaagtgggggattgaagatgccaagatttatactgcttgtggtttacctaatggcaatttgggtaaagatgcatatcctggtgtaaataaaaatgctgaaaatacgatgtcagctaaggatatggctattgtcggtcaaaaattaatctcggcattcccagaagtattagaaactacacgcttagctcacttaaactttaaagatgctggtcacgtaactaagatggctaactttaactggatgttaaaggggctttctcaatatgatcaagcttatccagttgatggcttaaagacggggactactgatgctgcaggggcttgttttatcggaactgtgcaacacaatggtgctcgtttgatcaccgtagtaatgggtgcacgtcaccgtgatggtactgacccagcaagatttatgcaaaccaagaagttaatgaactttatttttaccaaataccgtcctgttacgatgactgcaggtagccaaatgaatggtgccaaaactattaaggtaactgatggtgataacgcaacaactaacttgggtctaaagaacaagactactatttgggatccagcagatggcaaaactttggttgcatcattaaacaagaagacagttgaagccccaattaagaaggatcaaacaattggtgactatcaatttaaatctggtaatgaaaagattgtttcattgtctaatcctaatgggatgaacgtcaaggctaaggcattgtcagctaataacaaggtgaacttttttgtcagaatttggcgctggattttcggaggaagataaatatgactgaaatttctgaagatatcttgaaaaaggtaattaaagaaagagaaagcgatacacataaaggcgattacggtcgtgtactcttgatcggtggtagtgagaactatggtggcgctattattatgtctaccgaaggcgctattaatgctggcacaggtttgactgctgttgcaacacaccctttgaatttagcaccgttacatgcacgagtgcctgaagcaatatttatcaactggcgtgatgctaagctagcagatttaatcaaaaatatggatgttgtagtttgcgggccaggattaggcatgagtgatctcgctaagcaaattttagttatcttgcgaagatgtacttcagaaaaacaaaccgttgtcttagatgccagtgctcttgatttaattagtcaggataagaacttattgccaactaatgctggccacttaatcttgacgccgcatcaaatggaatggcaacgattgagtcaaattcgtattccgtttcaaacagatagtgccaatattgatgctttaaaccaattgattccagatactaatgcgcttttagtactcaaatcgaatcatactcatgtttataatgggactggtcaaatttttgttaatccaattggcaatccaggcatggccactggtggaatgggtgatactttagcaggaatcatcggtgggatggttgctcaatttggcccaggcgttgaaaccgttcaagctgctgtctatcttcattctttagcaggtgacttgcttgccaaagataattatgtggtacgaccaacggaactttctaaagtattgcctaaattgatgaaaaagtattcagaattggcataaacatgttaaaattctaatagtaaataaatgcatccctagttgagggatgttttttaacgcttcaaagacgaaaaagcataatataattgagttaaatattaataaaaaagaagattaacatatttatgaaaaaaaacattattatcggcgtaactagtatcgttctagcttttggtgcaattatcggcttagctaaggtatgcgcacctaagtctgatgtctcacaagaagctgctacaacgcagactaaggccaaaactaagaaaataaataaaattaagaaaaaacaagctaaaaaagtagataatggtgctttatatcgaccatatagcgatcctaaggacttgcgcaaggcaggcacttggaagaaaaagagtgagcttaaaaaatatcctaagattaagccgtatgaaaaggatttgactttgcgggtatcattaaaaggaaaccggacctatttgttaagaaaaggcaaggttttgtataccatgttatcaactggtggaatctataagaagggcaagtcattgaccccaactggaacttttaggatccaaaatggtcgtggagacagctttttcaattataacttaggtgaaggagctaataattggactagttggagtcctgataacgtgtacttgttccactctgtgccaactaaagctaattatagctataacttaaaagaagcagccaaattgggaagaactcaaggttcacatggttgtatccgtttgagtgtacctgattctaagtggattatggatcacatcccagatggtacgaaggtagtcattaaaaataattaacaagaacgttgctttttaagcaacgttttttaaaaaattgcagtaaaaaactttgttcaaagcgttcaagattttaatccaactcaagaatggcttttttaaccaaattagtggcagaagccgttttttcctgctataatcatgtttgccaagaagtcaaaagtagtagttattttctttttaagcgagtctatgttggtgcaagatagatactagaagataatgaaggcgtgtttgactgataaaatcaagaatttaaataagcggatactttgtatcaatctgagtggtaccgcgggtttttaactcgtctctttctacatttgtagaaggagacttttttatttagaagagaggaataagatggactttaagaatgaagtagttgacttggttgctagtcaagttgatttacctaaagaaaaaattgctgcattaattgaacgccctaaaaatgctaagatgggagactatgctttcccagcatttattttggctaagactttgcacaaaaatcctgcagaaattgctaaaaatattgcggataacttatcaagtgataatttcgctaatatccaagcagtcggtccttacgttaactttgcgattgatcatgaaaaattagtttcatcgactttgaaggatgttttgactgaaaaagaacattatggtgatcaaaagattggtgaaggaaatgtgccaattgatatgtctagccctaacattgctaagccaatgtcaatgggccaccttcgttcaactgtaattggtaattcaattgctaagacaatggagaaggttggctatactcctattaaaatcaattacttaggtgactatggtactcaatttggtaagttgattgctgcctacaagcactggggtaatgaagaagacgttaaaaaagatccgattatgaatcttttccactactatgtaaagttccaccaagaagctgagaaaaatcccgaacttgataatgaaggtcgtgaatggttcaagaaacttgaagacggggatccagaagcagttaaactatggaaatggttccgtgaggtttcattaaaagacttcaagcgaatttataaagaactaggcgtaacttttgattcatacaatggtgaagctttctttaacgataagatgcaaccagtaattgatgaattaaaagaaaaaggtcttcttcatgaatcacgtggtgcgcaagttgttgacatgggtgaaggtgaaaatcctgctattatcgttaaatctgatggtacttcaatttacttaactcgtgacctcgccgctgctgaatggagaatgaaagaatataacttcgttaagatgctttatgttgtaggtaacgagcaagcccaacactttgttgaattgaagactgttttgaaaaagatgggttatgactgggctgatgaaattcaccacgtaccatttggtttaatcacccaaggtggtaaaaagttatctactagaaaaggtaacgttgtcttcctcgatcaagtattaaaggatgctgtttcacttgctaaaaaacaaattcaagaaaagaatccagatttagcagatcaagatcaagttgctcatgatgttggtgttggtgccgttgtcttccacgatttgaagaatgatcgtttagacaattttgactttgacctagaagaagttgtgcgttttgaaggcgatactggtccttatgttcaatacactaatgctcgggcacaaagcgtcttacgtaaggccgctgcgatgggtgaaaatcctagcgaaactgatctagctcttgatgatgactgggcttttgccgtagccaaagatttagcagatttcccaagaattgtagctagaagtgccgaaaagtttgaaccttcagtaatagctaagtttgccttagatttagctaaaaaactcaataagtactatgctaatgtgaagattttaaccaaggacgataaaattggtgctcgtctcgccttagttcaagcaacatcaatcgttttaacggaatcacttagattgttaggtgtcaatgctcctaaagaaatgtaagagaaaaacaatgaaaataagaaaataacgcttacatttagtgaaagattgttcataattccagaattagggtacaatatgcatgtaagatatttaggaggtattttttaatggcttattttgacaacggtaatcaaatctttaaagatgctcgtaagaaccattacgctgtaggtgcttacaacactaacaacttggaatggactcgtgcagaattacgtgctgctgaagaaactagaactccattgttgatccaagtatcaactggtgctgctaagtacatgggtggttataagttcgttaaggacatggtagctgaccaaatggattcaatgaacatctcagttccagttatcttgaacttggaccacggtgactttgaatcagctaaggaatgtattgctcttggttactcatcagttatgtttgatggtcacgcacttccaactgatgaaaacttggctaagactaaggaaatcatcaagttagctcatgaacgtggtatttcagttgaagctgaaatcggtaagattggtgaaaaccaaggcggcggtgaattagcttctgttgaagatgctaagaagttcgttgcagctggcgttgacaagcttgcttgtggtattggtaacatccacggtgtttacccagcagactggaagggcttgaacttcgaccgtcttaaggaaattgctgaagcagttcctgacactccacttgtacttcacggtggttcaggtattcctgaagaccaagttaagaaggctattaagcttggtattgctaagataaacatcaacactgaattccaattagcattccaagaagctactcgtaagtacatcgaagacgaaaaggaccttgacaagaaggctaagggttacgacccacgtaagttgttattgccaggtgcagaagcaattaccgccaagatgaaggaaatgatttcttggatgggtaccaagactatcgatgacgaacttaaggatgcttcattcgaccgttcatcattgaacgaagaataatcatttgataattatttaaataaagtctagcgtttgctaggctttatttttttaggcaaatttggtgataacttaattgaacctattataaaagaaatataaaataaaaaattgaattataaagaaagtataaaaagagacttttatggaagaaaaaatgttaaatccatttatgcctagctttggtcgttttcctaaaattattattgatcagcaagaggcattaactgattacttaactggcttacaaacgcacgatgctaagtatcaaacttctttagtctatggcacaaggggatctggaaaaactgtttttcttttaaatgtgcagagatctttagcaaagctagataattggatatttattcgtttaaataatggtcaaggaaatttgctttttcaattaatgcatggtttgcaacgagttgcaggtatttcgttagttgacttgttaaaaagtgttaaaagtttgaatattatgggaaagggaattacttggcaagcactacaagaatcacagcaaattgattatgatgagtatatttcaattttgctaagtcgattaaagaaacaggggaaatcaattttaatcggaatagatgaaattgaaattagtgatgatgttcgagcttttggatcagaatatcaaacattgattggtgatgaataagatatttcattattgatgacaggattgccaagcagaatatccgaagtacagtatgaataataccctcacgtttttactacgtagtaatcgtgtttatttatcaccgttggataaaaaaacaatagctaatagctatgagaaagcatttactaaaggaaaacgtgaaattgatttcatggtattggatgaaatgagccgtgcagttaaaggctatgcttatgcctttcaaacgattggttattatgcttggcgatttagtcgggaattattgcagttaaacgaagaagttttgaaacaaacaattcgagctgcaaaaaaggacctttttaggaatgcctatgaaagaatgtatatggatctttccaaaaatgatcgcgattttatcgaagcaataatcaaagctggaaccgatcgtgtcacgacaaaacaattgcaagatatcttaaacaagccgattaattacatttcggtatatcgagcaaggctgttagatgaccaattgattacatcccctcaaagaggagtagtacaattggcgttgccattttttgcagagtttgttgaaaaatctaatttagaacatttatcttagaaaatgagcaaatataataaattatggcaatatatcaaagataataaggctggggactttgagctttcttttgatgagcttggccagcaggctggggttgccttagatcattcctttttgcgttataaaaaagaattatcagcttatggctttgaggtgcaaaaaatttcattgaagaataaagtggtgaagtttcatcagttgtaatgaaagctattaataactaaagtagtagtttgcgataatatcttcaaaattagtaactatgttttgttttagaaaaagactaagatgtaagtaaaaaatgggaggattaataagttactatgaagaaggttttatcttggccagtatattatcaactatcagagatttatacggcgccattaaatgtaatttggtttgtctttggcgcggcaatgtcgtttcaacaatatcacatgtttaatttgattaacattttactgtgcttagtagatgtttttctgtttgatttagcagttaatattgctgataattactatgattatcttcatggcaaagatcgacattttttgactgatataaatccaattggtcgtctgaagttacctttaactgatgttagaaacttagtgtggattagttactttatttcggcgattccgggtattattttggtttatcgcaccggctggccagtactaataatgggagttgtaggatatttcattggaatattttacactgcgggtcctaagccactgaatgcaacaccgatctgtgaattagtggtatctttttttatttcgtatttcattatgctagtaagcatctatgtcacaatttacggcacttatcctttgacctggaacttagcattaactactctgataagatgtttgcctttaacactcattttctatgctttgcagttagctaataatacttgtgatttgcatgaagatttaaacaatgggcgccatactttagccagttatactggtaaaaaatatgctcttaaaataattaagacgttgattattgcgggattattatttccaattatcgttgttctttttggtttagcaaaatggccattgatctttagttgttttttgttgccaatattatggcaaaaattaaaacaattttttgagcatccggataaacaaactacctatttacaaatgattaagtatttatcaatatttttcattacatatatagctatttatacagttttggtggagactgtaaaatagtttgtgtaaggatgaatgattccttaaatttatttctttaaacattagaaaaaggagttcctttctcgtatgattggtttgaacaaaaaaacacatacagaaagaagaactccttcatgaatgattttaccaaagattttgctcaagctctattcaatccagacaaaataaatgatttattgtgcaaagagctacaacaggctgttaataacttgttagaagctgaattgactgcctttctgggctatgatccctatgccagaaatggctggaatactggcaactctagaaatggtgcttatttccgcaaagttgatacgcaatttggcccaattgaagggcaagtgcctcgggatcgcaacggtcaatttcatcagcacacgctgcctgactacaagcagcactcggatatcttggaaagcatgattatcaagctttactccaagggcgtgaccaccagggaaatagccgatctaattgaaaagatgtatggcagccattacagtccagctcaggtatcaaatatttccaagcagatgattccaaaggttgaggcttaccacaaacgcaagctaagcgacaagtttttctgcgtctatttggatgcgacataccttcctttgcgccgagaaacgtttgagcgtgaagcagtctatattgccattggcatcaagcctaatgggcacaaggaggtcattgactactgcattgcacctagcgagaacattgaagtctggacagatatgcttcaaaacatgaaatcccgaggcttaaagcaagttgagctttttctttctgatggtgttgttggcatgaaaacagccttggccaggacttatcctaaagctcattttcaacgctgtttggttcatgtcatgcgcaatatctgcgctaaagtacgcgtcgacgatcgtgaaaagatcatgaacgaattcaaacaggtgcatcaacagacaaacaaagaagaagccacagctgtcctgcatgacttctataccaaatggggcaaggtttacagccatgttatcagaagcttgaaagacatagaaccagatctgctggtcttttataactatcccaagcagatcagagcttcaatttattcgactaacatgattgaatcatttaacaatgtgatcaagcgcaaagctaagcctaaggcagaatttccaactgaacagtcgcttgatgtatttattggcatccaggcaatgagctacaatgaccgctatttcgaccgaattcataaaggctttggtcaggttcaggataccttagaatcttattttgaataaataattaaaaaatcaatttgcgagaaagaactatttacacaaaagatttgacagtttccaggattgcattactatagtttatgtaagttatgaataggtagtaagtaacttatgaatttcaagatattcattgatttaatgaggagaacgaaaatgaaaattttcaacaagaaaaacttattattgtcatctgcagttgttgcagggatgctattcacagttggtactaaggctgttcaagctgatacaaccgatagttcacaacaagcaactacaaatactttaaaggtaaatgcaaatactgcagttccagataagaatttgattacgccagtagctagccgtgataatcaaactcttcgtcaagttgcagaagcaaacaacacttcattaagtgtattggaaaagttgaatgataatattgatccagataaaaccattgctaatggcacgccattatatcttccacaaaatgaagatttgtcaggactatttggtatatatcttagatcagatacttcagttccaagctcattaaagagaaaatattatgatagtctttcagcaaaagagagagctgctaagatgtggattattgcacgtgaatctggtggaaattacaatgcaagaaatggtatctatattgggcgttttcaattaacaaatacttatttaaacggaaattatagcaaagcaaatcaagaaaaaacagccttacgatatgttaagggacgttatggttcatggtcggcggctaaaagattttggcaggctcacaactggtattaataaataaacggaaagtggaaaaaatgaaatttcaaaaattagtaactagtgtattattagtagctagtaccactggtgtattaatgactgcacctaaacgggttcaagctgtagctgataccaatactactgagagtggaaaacccgtcgcaaatattgttaataagcctaacctaacaaaacaaggttatgtgttaactattcaagccccatcagggaagatttatgtagggcaaaagaattacaagaaacaattaactactactaagccaatatctaacgcaaaatcagttagttggaagaaaattaaaaacgttagatttagaattgaaaaagttgcttatgcgacaaaggttataaaatttggtggagcaccacagtatctgcttgtctctaaagataaaaaatatagttgctggacaacgcgttattctattaaatactatttttggaatactaaaaagatgcaacaagtaattaagccattgtctaaattgacaactagaaactcttcaagcctaaagaagattcggaataagcaagattttaatcaagctgtattagctgctaaaagattacctgctaatcaaagaaaagttgtcttagaatctttgaatcaagtgaaaaaagttggcaatattgataaggctgaagataatattttgttgttcagcttttagtgatatttctagcacagatttaaaattaatataaaactgaagttagaagaatttatttaatgttgagggggaagaaattgtgagaagtatatctaaaggcattgtatctttgatagcagctacaatgttattagcagcaggggaagggatagttcctaatactgttaatgcttctatgctagattcggctaaaagtagccagaatagtcaagaaagtagtagatacacttggcagagtgttaagctaacagatggaactgaaatgcaaattcttccagataattcttcaaaattagctggaaagattaaatataacggtcaaatatattcatatcgcattgtttcaaataatggtgtatatactatttatttgaataatgaggaagtatattcagttgatataaataatagccagttacctacgacaagtgtaggtggttttgatccatttattaattttacgtacgcaaatggtaaggtagcatttaaacatgcaggtagaaagtattattatttgacgacagagaaatatagtgcagatacggtaagaagactgaaaggaactactaaggatattattattggtttgcttggatttgttcctgtagttggcccctatgtttctgccggcggttttgcctatactgtttataatgatatttttggaaagaatcctaaaaataaatggtatacgataaaagaatattgcactagagggtatgaatattatgcttggaagacctatacttatactgactctcatagaaaacatctacaatctgttaaatgggagtataaaaaagtattatgagaggaattttaactagtagagttgctagaggcatattagcgtttatatttatattttttacgggttggtctgctgcaagattaatagtacagatagaacgttctgaatcgatatatgactaccttattttgggaggatttagtctagttttaggtattttggaactctatagattaataaatagtaagtaacctgaaaattttagaaaattgaacgttaacgtgaatatcaatataacacgcttagcttaaatagtcttattagtttttataattcagtaagataatcggcaaaatggtaatatttagttgtagtcgcttcaaaggataaaaagtattcaacttggattactcaagctttcttgcaatactactacctaaacagcaagtctatgcaaggtgtgattaagccactcaagcgaattgctaatagattaaataccagtctgaagaaggcaaacaacaaacgtgactttaacgctgcaatgaaagctgctaagaagttacgtggcagtcaaagagattttgttttacgttcattgaatcaacttaagaaggatggctccatgaatgtagaaggaaagaacttgttattgtttggcttataaaattaagatattaagtagtaaagctcagcgaatgactgagctttatttttctaaaaaataatttttatgcataagaaaagattagttattagcagtatatttgtgcttcttatcattgctggaatagggataatattttttagcaagaattatgggcaaagtaatactgtggttcgagttcaaactgtaaatattaattctaaagctaaaaagattgctaactatgacgtgcttgcaaatggaaaaacacgtgagtctcatagtacgggtgattttagtacggcagaaagaatcaaggttagtccaaatatttttgacacgtatactaagaaaaatcaaactcatttaagactattgaaagaagtgccattatataatcaaaagaaacacaaagttgatgatgctaattattggaaaatgataaacagcattactaaaaatgtgcacgctgatatttataaattgacattgtttaaggcacatagctcttattatgcttatgtgcaaattaatcagtggattttagatgcaggtactctttatgaatataatcctaagtcgaacattttaagaaaattgtgtgattttgatggaaaagaagtcataaatattagccattaatccatgataaagctcagcgaattactgagctttatttttttgtgaacggtagtcggcaaacagtataataaacttataccaaaaacattgaagtggattatatttagaaaagaagatggaaaatggctaaaaaagttacgccacgcttggtattagcgattttgtcggcagggatgctctcatttttaggaatattggatgaaacagccacgacagttacttttccaacgttaattaaagaattttcgattaccactgatcaagttcagtgggtaaacacactagtcttattggtaattgcgactatcgtaccgattagttcacagattagattaagaatttcgactaagaaaatttttattctaggagttcttttgtttactttggggctaatcatcgatattttatcaccgcgctttgatttattgttattaggacgggcaatgcaaggagtcggcacggggattggcttaccgttaatgtacaatattatcttggctgaagtacctaaagaaaaactaggctttatgatgggaatcggcactatgattactgcctgtgccgttgccttagggccagtttttggcggaatgattaccgatgcacttaattggcgctggatcttcattatttcgctatttttaatgaaaaacgcccggaaattccccgtattttaatgcggggatggatagggccaagctgacctaatggtcagctttttttattaaaaaatgaagacatatgttcgacttttctgtaaaatataaatatctaatctacagaaggaggtgaaacacatgaagagaatgagcagtttagcctaccattttggcttgaaagtacgcttttatcctagttctaaacaaaagaaaatcatcaagctaaattatgatgctcagcgttttgtctacaactcttatgtaggacgtaatcggaacaattatcgggctaagggctacttagctgttagacaatatcaagtaatgccttttgccttttctgttcttaataattatgagactaagctagcagaagaagtagtcgccaataatgagttattggctaagccaaagaacattcgcgatgcctatagctttttacgcgttaaagaaattgacagtctcgctattgccaatgcgattcaaaactatcagaaagcttggaacaactatcgcaagcttggtcatggaattccgacttttcacaaaaaacgtagtgattggtcatatcagaccaactgtcagtatcctaaacagacagaagcctttcttgataacgggacagctagatttattgatgctaagcacgttaaattgcctaagctaggcgttgtccgcattgccagctttagaaaactgattaaagagcgcttgcttaatcatatctcaactagaattgggacagtgacgataaaaaagaccgctgacgagcaattctacttatcaatgcagttaggcagcgatattgcctttgttaaagccttgcctaagacgcagagtcaacttggaatagatctcaaccttgataatttcttgacggattcaaatggatcaatggtcgctaatccatgcttttaccgcaaagccaaaaagaagctggctcgtgctcaacgagtattatctcgcaggcagcgccgggctaaaaaagaaggacgcaatttgcggctagcaaaaaactatcaaaagcagcgcttatcagttgccagactgcacgacaagattcgcagacagcgtgaagacttcttacaagttctctcaactgcattaatcaaaaaccacgatttagtagttgccgaggaattaaggagcaaaaacctgcttaagaatcatgccttgtctcaagctatttctgatgttggttggcgtagttttctgaacatgctggcttataaggcagatctatatggcaaagaatttctaacaattgatcctaagtacaccacccaaagatgccatcaatgtggcagtattatgggccaaaacggttataagaaattaacccttaaggatcgggaatggacttgcccaatctgtcagatgcatcatattcgtgattggaatgcggcagtgaacatcttagaaaaaggattaggcaagtggcagaatcctaaaataaaagaagcagcctagaaaggctgcagtccgctagcaactcgcggacttaaaaggctttggtaattagacgacctctatcggcaatagtcaaaagattactgctggtaagtcaaatccgtatctaagcaagttggtgttctggttagcgcaagctaacgagccagccaccaagccccagaatttattctggggcagttgacttatcttgagtctatttacgggaagctattcaattcggcagattaatccgcttgaaaaagtgaagttcaagtatgtgcaatggctatctttggctattgggctggtctgtttaatgctgggctttacgcggattgctaaatattcatttttctcaatccgagtttggggcttcttaatcttaggaattattagtttattaatttggctcaaaatatcttggtccgatacagcagcattgattagtccgcaactgtttaaaaatttacgttttagcatgcagttaatagcttattgctttgccaaaattgcgatgctagctttgggttttatctttccaatctatgtctaagctgtcaattatggttccgtttcattagccggtggggttacttttcccggtgcggtaattaatgcgttaatggcggccttagcgggcaagctgcttgataaaaaaggcgcgcggttgccgattattataggaataattgctagtttgactagtttaattttgatgaatgttttggcaccattaagcaatcttgccattgtattgttatatgttctttattatagcggatacgggatgtgctttggcagtttaatgactagcggtttgattactttaggtaaagctagccacgcacaaggtaatgcgatttttaatacgctgcaacagttttcaggtgcactggggactgctttagctgggactttgattgcgctagcgcagaataatcatgtaggtaatggtacagcagtcggttctaaatggacctttatgatattactaattttgataattattaagttattcttggctcttgtgtttgtaccgaagaagagataaaagaaagttcagcgaaagctgaattttttattttgtaaatatattaactttaaatacgtaatatttgattaatatactaaacgaaactgtcgaaactgtcaaatcttttgtgtaaatagttctttctcgtaaattgattttttaattatttattttcaaagtaggattctaaggtatcctgaacctgaccaaagcctttatgaattcggttgaaatagcggtcattgtagctcattgcctggatgccaataaatgcatcaagcgactgttcagttggaaattctgccttaggcttagctttacgcttgatgacgttgttaaaggattcaatcatgttggttgaataaattgaagctctgatttgtttgggataattgtagaagaccagcagatcgggctcaatttccctcaaacctttgataacatggctataagctttattccattttgcataaaattcatgcaagacagctgcagcttctttttggcttgtctgttgatgtatctgcttgaattcgttcatgatcttttcgcggtcatccacccggactttagcacagatattgcgcatgacatgaaccaagcagcgttgaaaatgagctttaggataagtcctggccaaggctgttttcatgccaacaacaccatcagaaagaaagagttcaacttgcttcaagcctctggacttcatgttttgaagcatctctgtccagacttcaatgttctcactaggagcaatgcagtaatcaatgacttccttatgtccattaggtttaatgccaatggcaatatatactgcttcacgctcaaacgtttctcggcgcaaaggaaggtatgtcgcatccaaatagacacagaaaaacttgtcgcttagcttgcgcttgtgataagcctcaaccttggggagcatctgcttggaaatatttgatacttgagctggactataatgactgccatacattttctcaatcaagtcagcgatttctctggtagttacgcctttggagtagagcttgataatcgtgctttccaaaacatcagagtgctgcttgtagtcaggcagcgtgtgctgatgaaactgaccgttgcggtctcgaggcacttgcacttcaattggtccaaactgggtatcaaccttgcggaaataagcaccatttctagaattgccagtattccagccatttctggcatagggatcatagcccagaaaggcagtcaattcagcttctagcaagttattaacagcctgttgtagctctttgcgcaataaatcgtttattttgtcttgattgaatagagcttgtgctatatttttggtaaaatcattcatgaaggagttcttctttctgtatgtgtttttttgttcaaaccaatcatacgagaaaggaactcctttttctaatgttttaagaaataaatttaaggaattattcatccttacacaaactattttacagtctccataaaatggtaatgctcaaaattttttgagcattttttataactataagatctaaagagatataaaattaaagccaacaactaaaataatgaaaataggtgaacatcaattatgtctgaaataacgaatccatttgaccctaactttggcaaagttcccaaaatatatttggggcgacaaaaaatagtagaagatatagtaagatcacttgaaagtggcaccggaccctatcaaacttcaatgatctatgagatgcgcggggttggtaaaacttcattacttgctgatattacctcaactttagaacaaaaagataactggattgttatttacttagccatgacaaatgatttgcttgccacgctcatccaaagtatttatcaagaagcagcgaatccagtaaaaaaggcgttgaacaaaattgatggtgtaaagttttcggcttttggctttgaattggaagttcatatatcaaatcctcaatctacttatcaagtgttacttgaagaaatgttaaaagttttaaaaaagcatcaccaatctttattgatagcaatagatgaggttaaagaaactcctgagattgttaatttggcgtctatctatcaaattatggtgttaaaaaagtattcaattaatatgatgatgactgggctgcctaagaatgtttctgaactccaaaataatgatgtattaacatttcttttaagaagcggtcgtgtaccattaggaccacttgatcttttcgatattaagtatcggtatcaaaaagcatttgaaagaggtaataaagagattaataatactgccttaatgaaaatgactaagctgactagaggttacgcttatgcatttcaagacttgggatatcatgtttggcaacattctactgatcaggtaacagatgaaagtattgaaaattcgatctcatcgtttaaaaatgatctgtttcgtaatgcttatatcaagattatctctgaattatcgccagtcgatcgaaaatttttattcatcatggctcataatgataaaaatgttgttaatataagtgatattcgcaagcaaatgggaaaaagttctaattatatttcgcaatatcggcagcgattaatggatagtcaggtaatcattgatgcaggatatggcaaagtggcattttctctgccattcatgaaagactttttgttagaagcagaagaattatatgaaattgataactaacgaagaaagttgctctcaaaaatagagcaactttttatttgataattagactcttcgcttttgtccaccaaatgcgtaaacaataagcagaggtaaatgataagatccaggttaacagccagattccaaagaaagttaagaatgggtggtaaatggcgtgatattgcatgttaagaccgcgccaaactaattgattccagaagacattggataaatatgcgcgataagcataagtagccaagaaatggaatacttttaaactggtttgcgaattttttctaacttgatgcaggcaaaaagctgaaatcagtgcaattactgctaaacaatagagagtcattgacggcttgtaatatggtgcattattgaagttgattggataaccgaacttgtgcaactcaacattagtccaaatgaagcaagcaataaataatatggtaattaaccaccaaaacttagtgaccagctggttgtaataaccacgcaattgccatgctaagacgccatacacaccatagatgaagaatgaaataaaaatgcggtcgagtaaataccaatcatgttcatgcatgccgtgaaagacgttgtaatcatagaaccaaagccaggcaaaatagagtacgaaagtgattactgcaatccaaatgcctcgagttagattgtgtcctacatagcggcttaatccccagaagattggcatcaaaataataaactgcaacatcatcgtgttgtaccacaagtgcggggcggcattaccattaatgaattgccaacagaatgaaccaatattgttaaaatgattaacttgttgcaaccagggcatccctaatagataaatgagcgtccaccaaatagtaggtacaaaaagattagaccaatttgtctgcatatgttttgcataagaaaaactatttttttcattattagtacggattgtggtatacaaaataccaaaaataaaggctggagccgtatatttgactaaattataaaaaacgccaaaaacatcttgtgtgtgaaccggttgttctacgtccatgaccagcgacataattggctgtgagattactgcgctgcaggcgaatacttttaaataatcgccaatatcagctatttgatagcttttaaattgatctgttttcatgaacttgctctcttcttttcctaatattattgtgtcatttttttaaattaggcgaaaggataatcatgttaaaattagtttagctattttggaaatggggtcaaaatgtcagtagaaaagatcacacaaaacgcactaaaagcattgctttatgaagtagttaccaatcctaagccaggtttagtggatccagttgacgtggggtctcatcctgatatgaatgtgtatttgtttattaatagcagtttgagtttagaaaattattttcggcaagcagctaaaattggagcagattttacggggcaggatttgcggcaaatgtttgaacaattgcgtcaagctggcattgaggcagaaaaagcaatgtttaagacaacacataatataaatacccataaaggcgcgattttttcgttagggttgtttggctgtgcaagtagctattgtgaaaataataatcaaggtgaatttgaagtgatccagcagatgactaagggcttagtaaagcacgatttaggcaagaggaatgagactgctggagaaaaacaatttttgcaatatggtaaaggtggagttagagcagaagcagaagctggttatcctttggtgagggatgtagcactgccatttttagctcaaaccgaaggtgatttgaatgttcgtttactcgatacgttgatgaaaatagttagtgcgattgaagactcgaatttaataaaaagagcgggaaatattgaggttgtttcttgggcacataatcaagcaaaaaaatatttggcattaggtggctacggtactcaagctggtaaacagtttatgttagaactaaatcagatttttaaagagaaaaattatagccttggtggcagtgcagatttattgattattacaatttttatggcgttgcagcgtgggattatttaacgcaaaaattgtctagttaagaactagacagtttttttgcttttagatttaaagagatttaaaatgaaaaatcctgttaatccgacttttggagatataccacaaatttttttaaaagataattcggataatgaaactaaaaatgtagattcaattttctatttaggtttagataccgagtattgaaaaagtgtctgggaaaaaactaattctcagacaggaaaaaagaacgatgatttcctaatggatttcatcgttctttttctatactttaagtgccttccttgatattattgaatcaccacaaaacaaaaagaaagaaggcaatcttaatgtatcaaaattataccataggtcaaacagctttaacactcaacttagacttcgctattcctcataatcatttggctaataccattagctggtttgtcgattcaattccagaagatgtcttattgggtaatactgctaaaaccggtcgtccagcttatcatccagcgatgatgcttaaaatcttgctttttgcttattccagaagagtattttcaggcagaaaaatcgaattaatgctggaagaaaacgtgccgatgatggctttggctgaacaccaacagatttcttaccatactatcaataactttagatccagcaagcatgccaatgagctggttaagaaaagcttcctctactttaccaatttgttagaagccgagggccttatcaatgaaggagcgatctttattgatggcaccaaaatcgaagctgacgccaatcgctatacttttgtttggcgcaaggcagttgaaaaatttcatgacaagctcaaaggtcaagcggttgagctttatgatgaattgattgccaaagaagtcgtcaaagcaatggcaaaagagaaagtccagaccagtcaaggtttggcagagctagcacaagaaacggaagccgagattgaaaagctgaccgaagaaattgagcaagaacctaaagcaatccctggcggttcgcctagaaaagcaagaagacgcggtcttaaaaagctgcttcataaactaagaaaagactatgttcctcgaatgaagaaatatgaagaggcgaaagaaatctttgcagggcgtaacagctattctaagacagatcatgacgcgactttcatgcatatgaaggaagatcacatgaagaacggccagctcaagccaggctataatattcaagccgccaccactgatcaatatgtggttgactttgctttataccctaatccaactgatttcagaactttcgaaccatttttaaagcagatgacgacactagacaagtttgacaagattgtcgctgatgctggttatggcagcgaatataattattcaatgttagaagaagagtattcagacaagaagtactatattccttataccatgtacgaaaaggaaaagaccagaaagtatcgcaacgatccaactaagctggctaactggttctatgatgaaaaagatgattattaccttgatcaaaatggcgtcagattcaacttcaaatattatagtcaacgtaaagatcgatcgactggtcaggttcgtgattttaaggtctatgaagcagatgaatttcaactaacgccagaattagaacgcttagccaagactaagagcggacgccaacgtcaggttcgctataatcctaactggcaatacctaaaagaaaaagccaaagcagttctccaaagtcctgaaggcagacacatctacagcatgaggaaatatgatgtggagccgatttttggacatttgaagaacgtctttggcatgcgccgaactcatttaagaggcaaaaagaaggttgaaacagatataggaatagccttcatgatgatgaatttaagcaaatattggaacagaagatggtcaaaagaccaattttctttgttcaaaaataaaaatagacagaaaaagacggtcaagcaactcaaattaagagttggattgatcgtctttcagtatctaagggttagttttttcccagacactttttttactatttgattagatttcttataatccaaatgcaattttgtataataatgcaccacagattccacctgcaattggtgcaaccactggtacccaactgtaatcccagtgggctgaacctttgtgtggcaaaggacataaagcataaacaattcttggacctagatctctagctggattcaaagctggtccagttggcccaccaactgccataactaaagcagtaattaagaaaccaaccccgatgttagcaatgtcttcagattgcttgaagaacatgccacgatataaaccaactgcgatgaaaagcaaaatagcagtgccaaagaattcggtaataaaaccgttgaacttactgttagccgaatcaccagtcgcaaaactggcaaaaacagcatcatcactagtggttctgccaatgtaaggccagtagacggctactaagattagttgtcccacgatggcaccaagcatttgtaccaagatgtaaggcattacttgatcccatgggaagacgcctgaacaagcctgagctaaggtaacagcagggtttaagtggttccctgaaattgaacccaagagcatggctgggagcattactccaaacccaaaaccgaaggcgatcaagagccacccaccattggcttgaccgtcacggctattaccaccggtatcacgtagtacagaattggcaactgatccgttacctaaaacaactaaaataatcgtaccgaaaaattcggcaaaatacttcattaaccaagtatgttccataatagatactttcttctcctctagtagaaaaaataagtgaaaaatagtacaaccacaaattatactcttaactcgaaaaatagatatagttttttgtaaaaaagcaagaaaatagcattaaaaaacactaacttttaaatagttttaaattaattaaaaagatttactatttggctgcaatcatcacaattttctaattatccagcaactcaataaattagaccgttccaaatatgaacattatttaacaagccctagataatgccaaatctacttttgacaaataaatgcataatcattatattaatttcacaaatttggtatatagctttatatatacttaatatataactttaagcgctttcaaaatattgtggtactatacagttgttcacaattaatatgcataaaaggaaagagagtagcagttaatgagaacaatatatttggtgcgacatgggcaaactttgttcaatgtgcatcataaaatacaaggtacttgtgattctcctctgacggaattagggagagcgcaggcgacagcggtgcggcagtattttttgcaaaaagaaattagttttgatgccgcattttgctcaaagcaggaaagggcaagcgatactttagaaattataactgataatcaattgtcttatacgcgactgcgtgacctgcatgaaaaatctcatggtgaatatgaaggacaagatgaattcatgttgccatggcgacgtggctttagccgtattaatgccgcaatggagccggatcaacatgttgaagaaagaatggaacgagcgatcactaaaatcattgattcaacccatgccaacgatacaattttgattgttggacatgggacggctttaaggttatttacgcagcgagtaaatccaacttttaaagaatatgataattgcgggatagtaaaaatgtctgctgttgataataacttgaaatatttaagttatgtagcacccgctaaagatgtggttttaaataaagcagctaaaaacgaaatgttagttgtgcgttaacgaaaagagaacaagcatgaatagagataattatattttgtggtttgatcaattgcatcgcgatgatgttgatttagtcggtggtaagtcatcctcattaggtgagctgacttctgaaacgaatgtcccggttccgtatggttttgcgactactgccatagcttatcgccactttatgaattattctgatttaaatcaaaaaattgataaattattggccactttaactgatccagaagattctgagcaattgcatcgaatttgcaccaaaattagaaaattaattatagaagcgccgatgccaaatgatttagccttagaaattagctgtgcttacgatagcttagcccaaaagatgcaccaaaatgagccattcgttgctgtacgttctagtgcaactgccgaagacctgcctgatgctagttttgctggcgaacaagatacttatttaaatattcatggtcgtgagaatgttttgaaaaaggtgcaagaatgttacgcttctcttttcaccgaccgggcaacttattaccgaattaaacaaaactttccacaagaaaaagttgctttatcagctgcgattcaaatgatggccttttctaaagcagctggtgtgatgtttacagtcaatgtagcaactggtgatgacactaaggttatgattgaggcctcttggggactaggcgaatacgtggtgtctggaactgttacacctgataactatgtagttgataaaaatacgatgaagattgtacacaaaatggtgactaaaaagccaattgagttgatcagattgccatcgggaggaacaattgaacaaaaggtagcaccagatcaagtgaatgagcctgctttgactgatgcacaaatcattgaattagctggttatgctaaagaaattgaaaaacattatggctgctacatggatatggagtggtcacttgatcaaaatgataagttgtggttagttcaagcacgcccagaaactgtttggtcacaaaagaaaaagcaggagaaaaccgatgcaccacaagaagcaactacagaacaccgagtattgttaaaaggcttgccagcttcacctggttttgtctcaggcaaggtacatattattgatgatccaaaagatatcaatgaatttaagcagggcgaggttttggtcactctaatgacgtcgcctgattgggtgccagcaatgaaaaaggcggccgcaattattaccaataatggtggaatgacctgtcatgctgcaattgtatcacgtgaaatgcagataccttgtttagttggaacaactagccgtggacaagctgctacgaaaactttgaaaaacggcgagactgtcaccgtcgatgctaaaaatggtgtggtttatgctggagttgttaaagacgcggttaaaaaagtcgatgaaaagccagctgagcctgctgcagttgaatatttcccaccaactgcaaccagagttatgatgaacttaggagatcctgatcttgctgaaaaatatgcatctttgccagctgatgggattggtttaatgcgcgaagaatttttatggacgacttatattcaccagcatcccctttatttgattgaaactggtcatccagagagggtagttaacgagctagctaatggaatcggtaaagtcgcgcgggcaatggcaccacggccagtagttttacgtttttcagactttaagtctggcgaatatcgcaacttaaagggcggcgacaaatatgagccgcatgaaccagcagacctattaggctggcgcggtgcttctagatattatgatccaaaatatattaatgcttttaaattggaacttgaagcggtaaaaaaggtgcgcgatgagttcggattaaagaatttacatgtgatgattccattttgccgaacagtggatgaagcgcgcaaagtgacggaaatcatgcggacacaaggtttagttagaagcgcagacttcaaggtttacatgatggctgaaattccagctaatattattttggcggaccagttcaatcaatttattgatggttattcaattggttcaaatgacctaacgatgcttttactggggtgcgatcggaataatgatgtgattgctgatctttttgatgaaagaaatcttgccgtcaaaagggcgattaggcacttgataaaggttgctcatcaagatggtaagacggtttcgatttgtggtcaagcaccatcagaatatccagaatttactgaatttctagtcagaagtggcattgattttgtatcagttaaccctgacatggtgaaggcgactaagctaaatgtagctcattatgagcagaggatcctccttgatcatacaactggcttaggtaaaaaggatccaaatgaatataattggtaaaatttataatttgatgaaaagtctttgattgcagtattgcagtcaaaggcttttttagagttcaattttgtttttgggcaattttacatttaatttagtaaaagagtaaggttgaactaatgaaatttcgtaagcatctaaggctaatctctcactggcaaaatcagggttatataaaggatcgcctacaataggacttcctaaagaggcaaggtgaacgcgaatctggtgtgtacgaccagtttcaagcgtcaatttgacaatcgcagtattgtcatcatttttttgtaaaacttgataatgagtaactgctcttaatccagtaggatcgattttgcgtttgcgttgatcaagtggatcgtgaccaattggggcattaatcgtacctctttcagctaagtgatcagcattgataactttagctaaataatcgcgatgaaaaattttgctggttaattcacgatttaaaataggtacaactgcaggatttttagcaattaaaagtaaaccaccagttaacatatctaatcgatgaacaatatagggactctgaccaagataagtagtacaatcgttcagagcagtattagtttcatttagattagggtgcgttttttgcccttttttcttattaataattaaaagattatcatcttcatagataacatcgggcatcttaccgcttggtgcataagcctgttgatcactttcaacatgatccaagttaatttcaattttatcaccaggtaaaatgttttgattaaaatagcgatagttgccgttaactaaaatattttgttcaattcgcaaaaaatgacgccacttgcgagggattaaaagttgacgtagtacttcattgacagatgccggagcaagattttctgggtaaaaaagtgtaaaacggaaactcataataatttcttaagtctaatctagttataaacacgtgttttgatagtatggtacaattttcttgtttctaaaaaggagcaatatttaatgaataacgaccaaccaagaagaggtggctttaaagatgcttggcatcgatttgatagtcgcttctttatcggacgctggattattttaatcctgctcacattgatgctcttaacttgtacctattatacaattaaagttaagacatcaaacatagctaatttgaaggcctcgctttcaaccacaactacaatctatgactacaagggtaaaaaagcaggttctttatactcgcaaaagggatcatttgtggaatatgaccagatttcgcctaatattcaaaatgccgtaatttcgactgaagatcggactttttggaagaacccaggttttagtattaaaggcatggcgcgagctactttaagtttagtgattcatcacggtcaagtaactggtggtggttcgaccttaactcagcagttagccaagaactcgcttttgacccagcagcagactttttcaagaaaattggaagaactcttttttgcaattgaaattaaccatgtttactccaaaaaagatattttaacgatgtacttgaataatgcttactttggtaacggagtttggggcgtgcaagatgcaagtcgtcgctattttggcaaaaacgcaagtgaacttaatccgagtgaagccgcaactttagctggaattttacgaaatcctagtttttataatccggttgatcacatgtcaaatgctttagcaagacgaaatttaatcttaaacttgatggtggataataataagttgacagcggctcaagctaaaatgtatcaaaagcaaggattaactttgcggaatacttttcaaaataaaaacggctatcgctatccttacttctttgatgctgtagttgacgaggcaatctctaaatatggcttaactgaagaacaagtcatgaataaggggcttaaaatttatactactttaaatcaaaattatcagggtaaattgcaggatacttttgagcaaagctggcttttcccacaaaatggtagtgatggaactgaaagccaaggcgctagcgtggcaatggacccaagtactggtgctgttcgggcaatcatcggtggtcgcggtaagcacgtcttccggggttacaatcgtgcaacgcagatgaagcggcagccagggtcatcaatcaagccgttggcagtatatgccccagctttacaaaatggctatcactatgactcgcaactatcgaacaagttgcagaaatttggtaaaaatggctatgaaccgcataatgtggacaatggctattctaatacaattccaatgtatgaagctttagaacaaagtaaaaatgtgccagctgtttggctattggataagattggtgtaagtaaaggcgtgcaatctgttgaaaactttggaattaaggtaccaaagagtgaccgtaatttagcgcttgccttaggtggattatcttcaggtgtttcgccaattcagatggcacgtgcatattcagcttttgccaacaaaggtaatttgcctaataattctttctttattaccaaaattactgatgcttcgggtaacgttttagccgaaaataataatccaagcagccaccgcgttatttctgaaaatactgctaaagaaatgacgactatgatgctcggcgttttcactaatggtacaggacgctctgctcagccaaatggcttccgtgtagctgggaagactgggtcaactgaagtacctaactcatatggatttggtaccaaggaccagtggatcgtcggttatacgcctgacattgtacttgctacctgggttggttttgaccacactaacaagcaacactacatgcagggcatttctgaaacaggaattacgcgtttatataaggctgagatggaaggaattttgccgtacaccgcgcaaactgaattcacggagaaggcacctaaccagattgtgaagaataatggttctaatgatgactggactaatggattaggtgaaaaaattcaagatggactcggttctgcaggacagaaaatcaatgaatggtataatagccttaaaggcttatttggccaataaaatttaggaggactagatggttaacatttacgatgctgctaacaagttagcagaagatttgactcaaactgatcaatacaagaagttgcaagaagcaattaaagctgttgaagatgataaggatgcttcagctttattcaaaaagatggatgaattgcaaaataagatcatgcaagcacaacaagctggtcaaccactttcagctgaagatcaacaagcttacaaggacttaaatgatcaagttcaaaagaatgataaaattgtttcacttcttacgaatgaacaggggttgtacgatttgcttggtgaagtacaaaaagcttacactaagccaattaatgatctttatgaagatcttagaaattaatattcgcgatgaaatttattcactttgcggatgcgcacttagatagtccatttcgtgggctatcttttttgccatctgaggaatttaaccatatctatcaagcagctgatcaatcattaactaaaattgttgatctggccttgcaagaaaatgtcgatttagttttaattgctggtgatacttttgatagtaatacgccatcaccacgagctcagctattttttgccaagcaaattaagcgattaactgaccaaaaaattcaggtagtgatgatttttggtaatcatgaccacatgaagcaagaagatctgctagttagtcccagtccttactttaaattgttaggcaataatgaaacagtagagcaagctacttttactacggatgcgggttttaactatgacgtaatcggcttttcatatctgaataaccatatcactgaggataaaatcccagaattcccagcaaaaggaaaaaattatacttttggtttaatgcatgctcaagagaaatcagctactgctagtcagaatgtgtatgcaccgtttacagttgatgagttgcaaaacttgaattatgactattttgctttgggtcatattcatgcgagaaataatttaagtagtacgccgtggattgtttatccaggtaacattcaaggtcgccacattaatgagatgggagccaagggatgctatctaggtgagattgatgaaaatagtggtaagactactattgattttaaagaaacagggccaattttatggcaagggacaaaaattaatcttgaaggagctatcagtaaagctgacttacaagcgaaaattattgccaagcttgaatctggacaaaaaacgtactttagtttgacgattgctggtgctcaatatttgagtgccgaagaacgcgatttagttcaggatcttgatttttggcaaactatttctcaatcgctgccatttgcttctcagttagttgatgtgcgctttgttgtgaatactagtttaaagttaaatgacaatgaccaacaagccttccaagctgccaaagaagagttatttgcaccagctgaattcaagcaaattgttagtgactggcaaaaaaaggatccagaagctgctaaattagcggctgatccagactttattgcggcggttaagaatctaacagaagtaaaactaatgagtaaattgaaaggaattaaggatgagactgaaacaaattaagattattaactttgggcagttctcgaataaaaccttcgatttgcctagtgatcaaattaatgttttctttggtgccaatgaagctggtaaaagtacaacggtagcttttattaaacagatcttatttggctttcatttgagaagtaactcttcaccgttttttgaagattatacgccgctagctcatgttagtccgatgggcggtaatttagtttttactgcagctgatggtgaatacgaacttgagcgactctatgctaaaggtgacaagactaaaaagggaattttaaccgtcaaaaaagatggtcaagttgtacctgagagtgtattttttgatcaaattcaaaatattgatggctctttttacgctgatagttttatttttaaccaagaaatgctgggtcaggttaacagtttaagtcaagaggatttgcttgagcgaatttattacttgggagcagcagattctagcaagttgctggaaatgcgcgacgattttgccaaagaaacgggtaagctttttaaaaagacaggtaaaaagcccgaagtaaaccgtctgcttaaggaaatgactgatcaacgtgataaattagcgcagactaaaaatgagtttaatgattatgaacagctgcaccaagattttgtacaaaaaagagcggcattaaacagacaaaaacaagatctggctgttttacaaaaacaagaacaagatttgcatgatttgcaaaaagaaatgggcaattatcagacgctgcttgatttgcaaaaacaggtcaaggatgtcgactttaatggtcaaaattatcaaaaagcccaagatattatggctcagggacgtaatttgcaaaagacgattcaatcggtagaagcgcagttgcagggcctgggtgaaaacgatcagtctgattttacgctagagaagaagctaatccagcagaagcctcaactcttgcagtggcaagcggaatatcgtaattgtttgcaaaaggctgaccaattgaagcaggagaaagagcaactattagctttgacacctgagttaaaaaatctactcaagttgacaccagagcaaattgaacaaatgcaggcagactatcaagctttgccaggtgctgtcaatgagcctgcttatgtaactactaatgacaagctttggtatgttatcggtgcagtgttagcggcattaggtgtagttcttttggtagcgttgggtacagttggtgtaattgcattaattactggactaattttcctagcagcaggatacttaaaaaatagtaaccaaaataagcaaaatgcggcagtattagaaaagcaaaagctggttgctcaaaaacgccaagctttccaaacaaaatatggattgaatcctgatacgctaaacttaaatagcttactaactaatctgaaccaatatcaaatcaaaaagaatgccgcacagactaataataagcaagtaactgttttgaatcagaatgtggctcaactggcctcaagtgtccaaaatgcattgaagcaaccgattgataatgactttagtcaagttttgaacggtttggacgaacttgagacacaaattagtgaaaaacaagaattgcttcaaagaaaatccagcttaactgcatcactaaagcaggacaagcaagatttgaaagaattgggtctgaaattacaggcactttttgcccaagctaatgtggaaaatatggcaggttacgatcagctttatcaagattcacttaatcaggctaaactgaagacgcagattgcggccttgaaggaatcgttaggcgatgatcttcaacagctgcaaatgcagacaaattcaaccgaattagcagataaattaacggctttgactgaacaaattagtactaagaatgcagaaattaatgaacttcagagtcaagttgctcagttgcaagtgcagttagacaatttagctgattctactgcggtgtttaaggctaagcaggatctggctaatacagaaaccaattttgtccagagcagtaaagaatacttggctaacttgtttgcggcaaggtggatcagtcgctcgcttgacttggcatctaatgaacggttccccaagatgcttaaggcggctcaggaatacttagctttgctaacgggcggcagatatgttgggattaatttagataagaagctaacagtagtcagaagtgatggtaaaaagcgcgaagtaaaatacttgtcacgggggactgctgagcaattatactttgccttgaagttagcttttattgagcagatcaaggatgaaattaatttgccaatcttgattgatgattcgtttgtaaactttgatgatcagcgagtcagctatatcgatcagttattgcaaaagattagcgaaaacaatcaagttttaattttcacagctcaaaagaatttagttgatcagcttgggattgagccattaacttttacgaaaggaacacaggatgcttaagagattgttagattacaacgatggagaagaaatggacattgttgttttgattagaaactcacagttgcgtcataataaaaagaataagttgtttttagcgatgcaattcagtgatggctcaggcgagattcgcggtaattactgggatgctaacaatcaagatgcagcaactttttcaactgggacaatcgttgagttgaatggcaaaagagaagaatatcagggtcgccctcagattaggatctattctctgcgcgtggtcggtccacaagaaggctatgaattagatcaatttattaaatcagcgccggaaccagttaatgagatggaagctgaaattaataaatttgtgatgcagattgataatccgacctggacaaaaattgtgaagtatttacttcaaaaatggcatgatcgtttttatgatcatcctgctggtaaaagcaaccaccatgcggtccgcggaggtttagcttttcatactttatcgatgcttaaggatgccaaaggtttggctgataattatgagcaagtgaatagatcgctactttatgcgggatgtattttgcatgatatgggaaaagtactggaactttcaggttctgccgcaactcaatacacgactgaaggaaatttggttgggcatctggttttaattgatgaacaaattatgctggccgctcaggatatgaagatgaatctggagtcggaagatttactcttattgcggcatatggtgcttagtcaccatggccgctttgaatatggttcacccaaattgccggcattgctagaagcggaattattgcaccgaattgatgatttagatgctgcaatttatgcagtaacgaatgccctgcagcatacgcctaaaggcgagttcaccgagccactactgagtcaagatggcaagcgatattatcgaccgatgcacgattcagcgctagataacgcaaaacatttagaataagaaataagcatcactgcagttgatttgcagggatgcttattttgttgaaaaattgaactagagttttattataatttcatagtataataaatctaatttataggggagtaaaaaggatggatattgctgaaattactaaaatgattgaggcggttaaacaaataatagaaaagaatgattacattgatttgccgctatttcagaattctagtcaattaaggttaaaaggaaataattataattttatacttgatttgaatagaaaaggacatagacgtcctaaatgtacttttctattaagggaaaagagaaataaggaacagccattagttagagtagatattattggacgtcctcatcaaaatcctgttggagactttaaatggtcaaataaagtcattccttgtcctcatttgcatagagcggattttccaaaatatggtacatatgtagctgtaccacttttggaaaagaatgaaaattttcaattgagtcagaatgatttaaataacttgtgtgaatgcttgaagaagacattaaagtttttgaatgttgataatataaattcatataattttcgagaacaggaaagtttattttaaagaaaggggggagaacagttaaatatgtttgatgtagagaaaatgaagaaaatatattttgactggatagataaaaagattcaatttgtcccttctaaaaatcaggattatatgactatcactacaccttttttagatatgtacaatgattatatagaattagtgattgcacaaggaaatacatcaaaatatataattagtgatgatgggtatactattaatgagttagggttattagatattaatttaaacagaaaatctaaacgtagggactactttcaatcgattttgattaattttggtgtgaaaaatcagaataatgaattagtaattgaatttgatgacttagcccaatttccagatgcacaaaataggttaactcaatgtatgttgcaagcttttgatttattacagacttctaaaaatagtgttattaagtattttaaagaagatgtaacaaattattttattgataataatattccagtaggagaagatttgagtttactaggaaaaagcggacggaattctaagtttgatattgtggttggacgtacaagaaaaaaaccgcaacaagctattaaggtggtgaatacgcctattaattctaatatagctaaccctttatttagaattattgatgtacgagaaagccaacctaaaacagaattttcagttattgcgaacaatattaatagtcctgtttctagtgattttaagtctgcctttaagaactataatattcctgtttattcttggtcagaaagagagcaatggctttccaaatttaaattggcaatgtgatagttgattaaaggtgttgagctgaaattgtaaataatattagttctagcattaggcaatatggaacatttagaataagaaataagcatcactgcggttgatttgcagggatgcttattttgttttggtgaaaaattgtgtcaataattttttgaacaaagttattgacaaattagctgaagaataataacatgtttatacaattgaaaagcagagatgtttttggatagattagagacttgtctcctttctatttttttattgataaaaagttcaagaggtatacattgatttcctcttggacttttttgatgcattgaattgctaaagatgttataaaaattagggtagggaataaaaatgaaagcatcaaaaaaattaattttagtatcggcagctacgataatgttgactgtacctgttttagcaaataatcatttgtctaatccagttgttgccgcaagtcaagataatacacaaactactaaattaacgttctatattaaccacaatgcctatgtttacaatcatcaaggtaagcgtaccaagagcaagattaagaagggaaagttactaaaggtgactatattgaagcctaaggcaattactaacccaaatcaaagcaggtatttcttcaataatgtattagctggcaagtatttttcgttaccgacagtaagcatcaagaagacagactttgttaatattggcaaaaataaatatattaagccaggcaacattggtagaatctcgccaggaaaatatcaatatgcggatctgtcaactaaggaaattaaggtaattaccaaaaagactgctccagtaactaatcaaatagggatgccaattgctgctccaattaagaagggaactaagcttacagttgatcagaactattatcataatgttgacggcgctgatgattatttgagtagtctggaatattatcggattaaaggtactgataagtgggtcaacctacctgctatcaaaaagtcaactcggattatgccaaataattttgcattagctgcatctactgaagataattatgtcattgccggtaactcaacgtatctctataatattgacggtgaaatcgttgataagagttatttattgattccagatgttaatgttggcgttgatcgagctctttatatttggaacaagcaaactaaacaagctgatctatattatcatcttacggctaacaaaaaattggtctgggttccagctcttgatggaacaggcaagactggtactacgattaccagcaacggctcatatgctcaccaaactaaagatacagcaaatacttttgttaaagctagtgatgtgacaagtcaaaatccagttgcattaaaagttgataatacaccgagcgaagcacaagcagatgcaagtcaggccactgctagtgactatggtgagttgcaagccttagttgatcgagcaggtcaaattaaaaaatcgactttatatcgtttgactgaaaaagcacagcaagaaagatatgatttggccgttgataacgcacaaaagttattgactaacaagaatacttctattgcggcagttaagcaggctagttggcaaattaaatacgatcaaagtaaattagacggacaaaaagtttgggttaaaaacatgaataaactaactaaggcagaaaagtcttgggtagtttcattggctaattgtgatatccatggtgatttacaaaaagaatatgctggcttttataaaggtaaaattgcggtagtgacttataataaaaagactttcaagagtgaacttgtacgctacttgaagttgtctgattatgctactgataaataaaattaaagagctcaagaatgctttaatgatgaagcatcttgagccttttgatttgtagtaaaaaaatatccaagaccgaaatcttggatactcattggagctggaactgtgcttgatgaggcaactgctagaatggcgattgtttcaggagctagattcgttgttagcccatcttttaacgaaaatactgctaaggaatgcaatctgtatgcggttccttacatgcccggttgctttagtccaacggaaattcaatctgctttaacttatggtgctgacgtagtcaaaatcttcccaggttcaattgctggtaaaggcattatttctgaaattcatggacctttcccatatgttaatgtaatgccaagtggtggtgtatcattaggaaatatgcatgaatggtttgctagtggtgcctatgttgttggtgtaggtggcggattagttggacctgctaaaaatgatgattataaagctgtattgcataatgctcaagcttttcataatgaatttcaaagtattatttatgccaactcagctgctactaggaaggtgccagtgagggcatagtttttttactgggggggaatatgatgcccctattaaaaaaataaattaatgaaataaaaaaacgtcgaatccattcagattcggcgtttttgattaactaaatatatttgttacttagtagttgaaacgtatgatgataatacatccttcaagtcgctatccttgattgaaacgtcagccttcttcaaaacagtagcaataacgtctttcatagtagcttggtcttgagccattgatgcgtaaatttggtcatcgatagccttcttgtgatcagcaaacttacccttagctgggtggctgatcatcttgattacgtggtaaccagattgtgacttaactggagttgaagtaacttcaccagtcttaagcttgaatgctgcagtcttgaatgagctgtctaaagtagtgtcagttgagtcgaatgatggcaacttaccagccttgttcttagtagcagtatcaagtgagtacttcttagctaaaaccttgaagctcttgccatctttcaattgcttgatgatgctttgagcagttgacttcttagcaaccaagatgtgttgaacagttaccttaggttggtagctcttccaagcttgttgttcttgcttcttagtaactttcttaatgtgcttcaatgcttgttcagaaagaaggttagtcttaatgttttgcttgaagcttgaagcagtcataccgttttgttgtaaaacagcactaaattgtgagccgtattgcttcttgtagttgttgtattgcttgtcgactttcttttgagatacgtacttgccgtattgttgttccaaagcgcggttgataatcatattagccaaagttgacttaccggcttgtgacttcttcatttcatcgtagtattgttgttgagtaatcttaccgcccttgtaggaagcaacagtagccttagtgccgctattagaacaagcagcagttgataatgcaacgccagctacagctacgactgcagcaatttttttcatataactcttcataaaaataatatctccacatccttaaataagtaactgttcattaatataccataaaaaagggcgtttcgttttcaaattacgaattttcacagaaaaatcaaattttctttattttttcttagttctttgtgtcttgtgagttagtatctggcacgatgttttccaaatcttggttcaatttatcgctctttttttctatgcggttaacgataggttgaatatggtcggaataatgttcaacactatcattaatatcactaattgtacgttcagctgttggcatttgttcatttaattcttgactagcctttttagctttttgcaaggcagaattaaagcgttggctttcatgtttaattgcttcgaactcatcttttaatggcttgcctgggcgattaccattgctatctttcatacaggaaaaaactagcccagctgttgcaccaaaaactgtgcctaataagaaatgtttcatttttaacctctaaaattgtgccttaattttgttagcaacttcgttgtatttagcttcatcgtatttgtcagcgttgttgcgggtcatcagcttcaagccatcgccttcaaaacgaggaatgaagtgaatgtgtgagtgcataactacttgatttgcggccttaccattattagtagtaatgttcattgcagtaacattagggaaggctgccttaattgcattagcaatttcaggaatatattgtaaatagcgttgtgcgtcttccttggtgtagtcaaacaagttaacgatgtgcttttttggcaccattaaggtgtggcctgggttaacttgagaaatatctaagaaggccttaacatcgtcattttcaaaaacggtatagctaggaatttcaccgcggataattttgcagaataaacaatctttgtctaaattttccataataaaacctcatatccttgtactttagtttactattaaatccatgctatcataataaaggtataaattcagtaaagaaagataggaaaaatgacattaaaaattgaacatttaacgggaggctacacgggtgtcccggttattaaagatattaatttggaaattaagccgggtgaggcactaggcttgattgggctaaacggcgcggggaagtcaactacgattaaacatattttgggtttacttcgcccgcaaaagggtaagatcagcttgaacgatgttgtattgacgcagcaaccaactaagtttaagcgtgaagtagcttatattccagaaacaccgattttgtatccggaattgactttaaaggaacatttggagctaaccatgttgagttaccacttggatgaaaataaagcatggaaacgcgcacatgagctgcttaagatgttcagacttgatgacaagctagaatggctgccgattcacttctctaaggggatgcggcaaaaagtaatgattgtctctgcctttttagcagatactagtttgcttgtaattgatgaaccatttactggccttgatcctttggcagttgctaacttaatcgatttaataaaaaaagcaattgctgacaaaaagatggtcttaatgactactcacgttttagctgatgcacagcaagcgatttcgaattatgctgtgttaaaccgcggcacgatcgaagttgtggggagtttgcaagaaattcgtcagcactatggccttaagccagatgatccttttgacaagttataccttgctttgaatagagaggataatggcaatgcgtgagttagcgaatagaaggttgagcgagaatcttaaacaatcagtaaaatatttgacgctggtgtttaatgacttctttattttagcgttgatctttttgtttggggcgctgatgttctggtatgcccaagctatgcgcgtaattcccaataatctgtggttctataagccacttgtcggctttatcatgtggttgccattattagctggtcgattagttaccttattaaaagaggccgacatgcaatttctgtttacgcaagatgaacaaatgggtgaatatctgaagccgatgattcgttacagtatggtgctgccaacaattctgattgttttgcttggcggaattctgtttccgtttgcgacggtaaaggctggaatcccagtttggtcatatgtaatcctgattatcagcactgttttattaaaattgtgtatgttgctgattgaaaaagagagtttgtacttctactacaattatccgcaatggatattattagtggtaactctggcggctttgttgattggctcactaggatcatttatttatccaattgaagttgtagtattaatggtaattacgcattttggtactaaaaaagaaaagggcgtctttaactggcgctatgcgattaaaactgaacaagctagaaaagatcgcgtttattcaatcttcagtatgtttaccgatgtggcagaaaagcaagttacaatcaaacgcagaagatacctcgactttcttttaccaaaatcattggctaaggaaaatcctaatttgttcttgtatcggagatcacttttgcgtaatccagaatacttgaacttattagtcagaatgactgtctttgcaatcttggtatcgtggttagtgcaagattggcgttgggcactaggcctttcatgcttggtaatctttttaacggtctatcaattattgccaatggcaacagagtttgaccgcaacttcatgtaccgcgtttacccaattgaacggcaaaatcgtggcagggacttggtagaggtgttgacaatgggcttgtttattcaatggctcttgattagtgtctgctggttaattgtgctaccaattaatgttaacttgtttgaagcgatggcaattttacttggtttcactatgattgtaactgccacttacttgccaggcagagttaaaaaaatgaatcaaaaaaattttggaattagataggaatagagaatgagattaagaaataaaccttgggctgttaagcttgtaaacgaccatccagaaagtgttttgcaaaatcctgatcctgaaaaaaagatcgactggactgaacgatttggtaatgatcatcccatcgaaattgaagtaggttctggtaaggggcatttcattactacgttagctgaacaaaatcctgataaaaattatgttgcattagaattgcaaactacggctgcggggattatcttgcgaacaaagttggaaaagggcttggataatttacaaatcttacgcggggatgcggctgacatcaactgcttctttccagcaaatagcaccaatgttatctacttgaattttagcgatccatggccaaagactcgtcatgaaaagcgtcgtttgacttacaagagttttttgagcaagtatgaacaagttctgaagccagaaggacatattgaatttaaaaccgacaatgcgggcttgtatgcttactctgttcagagcttgaataattatggaatgaagtttgattttgtttcagttgatcttcatcatgaaaagccagagattgtggaaaagaatattgaaacagaatacgagcataaatttgcagctaagggtaatccaatttatgctttgcacgctcattttgaggatgaatagtttgaagcgtctagagttacagcagataaactctaggcgttttttaatgctttattggataaaatcttgctactagctcatcgctttagttattttgttttagaatagaactgtaagatttcagattattggagggaaaattatggaagataaaccttattatgaacaagaatatcacgaacctaaaactgatattcctagaccaacttttggacaagcattcaaacttttgtttactgcaccatttaagtagaatgcacgtagtactcgtcgtggattttggtatgcctatgtttgggcaattattttgctagtcattttagcagcatgttcagctacggcatattcaattgatggcattgcttattcaagtaatgaattcttcttattaacgcacgtttcaactggtacacttattattcaaataattatctatctactgattatttggatcttattaggcttacttggctttaccataagaagattgcatgatactgaccacaccggttggtggtactggatctcggttattccatttgggtatttgtttttactttacttcatggttttgccaactgttgaaaaaccagttcgttggggcagttatctatttaaagaaaagaaataattgtaagactcaatttctagctttttagttaaagaatggttataataatatcaacttataaaaagtaagaaatacatgaggcatgaaaaatggaaaagattaaagaattaactgaagatcaattaaaggaaattactaaagaaggacgtactgtgcttgaattctcagctgattggtgcccagactgcaagtttcttgctccatttatgcctgaaattgaaaaagatttttctgatgcaaaattctacgaaattgaccgcgacggttcaattgacatagcaaaaaaattaatgattatgggaattccttcatttgttgtctaccaagatggcaaagaaattggtagactagtaaataaggaccgtaaaactaaagatgaagtggaaaactttttacgatcacttgactaatagaggagaaaaaaaaagcatgattactagtactaataaagaagcttatcctaacactttgatcgttatcttaggtcacgatgaaggccgtagctcatttgaggaaaaagaagacgttactcgcgtaactaacgatgaaggcaagaccattggttacaacttcttcaacgttgataagttagttgactttgataagttaccaaatggtccagttaagttgtcagacgatgagcttgttgcactgaacaagaagcttgatgaagttggttttactgacaagttagcatatggcaagccaactttagtttatggctacgttaagacttgtgaaccacaccctgattcagatcacttgcacgtaactactgttgaggttgctgatggtgaagaacaccaaatcgtttgtggtgcaccaaatatcgctcaaggtcaaaaagtagttgttgcacttccaggtactttaatgccaaatggtgcacaaatttggccaggtgaattgcgcggtgttgattcatacggcatgatttgttcagctcgtgaattaggtttgccacacgcaccacaaaagcgcgggatcatggttgttcctgatagcttcgaagttggtgcagaatttgaaccaactaagtgtgatgaattgattgctagtggtgaaattactttataatttgaataaagcaaaaataaaaagttaaccagttggtgcaaaaaagctaattgatcaacttttttattttgtctaagaaaagccaccagtttcaccttttaaggagctagtgaaccaattttgtgggaaatagttttacccgtaaggtctttaatgatcaaatgatcgacagtattaacataattgtcgttttcatcatagatttcttttgattttaaaaattttagcataagaaaaatggtaaaataattaacgaataaaaacgttgaaatttcgagggacaaataatgttagataaaaataagcaaatttggtttattggaatcaagggtactggaatggcatccctggcactgcttttacatgacttaggctataatgttgccggcagtgacatcgagaaatacactttcacccaagttccacttaaaaaggttggaattgaagttaagaattttgatccagctaatatcaagagcaatgctgagcaagtaattgttaaaggaaatgccttcaaggaagataacccagaagttaaggcttgcttagacaaagatgttaagtggcagtcttacccagatactgttgaagaagttgttcaaagtcatacttcaatcggtgtttctggtacgcacggcaagacttcaactactagtttgctagcccatgtgctcggtgaagtcgctccgacctcatacttaatcggtgatggtcgtggtaaaggcgttgctggttcacgtttctttgtatatgaagccgatgaatatcgtcgtcactttttggcatatcatccagattaccaaatcatgactaacatcgactttgaccacccagactacttcaaggatcaagccgattacaccagcgcttttcaatcagctgctgatcaaactaagaaggccttgttcgtctggggtgatgacaagcgtttgcaaagtttgaagaccgatattcctaagtacacttatggctttaatgatactgatgactttcaagctactcaaattgagaagtcgactactggttctaagttccacgttttggctcacggtaaggacttgggcgaattcgagattcacctctttggtgaccactcaattttgaacgccactgctgttgtggccgttgcttacaccgaaaaggtgccaatggaagacatcaagaagggcttgccatcattcaagggtgctaagcgtagatttagtgaaaaggacttcggcgacattgccgtcatcgacgactatgcacaccacccaactgaaatgcgcgccactatccaagctgctcgccaaaagttcccagacaagaagttggttgttgtgttccaaccacacactttctcaagaactaagaagtatcaaaaagacttcgaagaaatcttgcgtgacgttgataaagcttacgtaactccaatctatgcttcagctcgtgaagctaacggtgatatttcaagtgaagacttggttaagaatattcctggctcagaagtaattgacttagacaatattgctgacttgactaagaataagaattcagtcattgtctttatgggtgcaggtgatattcctaagtatgaagatgcttttgaaaaattgctttaattgaaagataagcatgaaaaaaactgttctcaataagagagcagtttttattttggctaatctttgattttatccttgagatccaggctcttttcataaataaagtaaccgatgatgcaggtgatgatatcactggctgcttgagcccaaacgataccgtggtagccaaatgtgacttttagaatttctaatgcgataaagtagacaacgccttggcgaacgatggccatgataaacgctgcccatgcattaccaactgattggaagacggtagtgtaaactaaaatgataccaacgattgttgtggtaataatagtggcaattaacatataattaccagcgttaacgatatctggttgattcataaatagagcggtgactggacgagcaaataaaattaataatccgcctgaaattacagcataaacaacttgcacaagaatatcgaagtttagaattttctttaatcgtttccagtttttagcaccatagttgtaaccaattaaaggttgtgaaccaaaggcaaaaccaacgattaccaagataacgatactgtaaatcttttgggtgattcccattgcggcaactttgtttgcaccgtatagagctaaagatgagttaagaagtgccatgccagagctttgagcgaagttggtgattgaaccggggatgccgattgctacgatatctttgattgttttgccgctaattttgctatattttagctttaatttgatgtagtcagttttgtataaaacgtagtaaatgagaatagcatcagtgactagataacctgtaacgttggcaatcccaacaccgattgcacctattttgaaaacaaacaagaaaataggatcaaggatgatagctaaaatggttcccgtcattgtagcaaccattgcttgggtagctaaaccttctgttctgattaagttctgcggaatgattgagaagataattggcgcagcaccaattgatattacacgataaaaatcggcagcatcttgataggtggcagcttttgctcctaaaagatgaaggatcggattttctaaaattagtaaaatggctgttagtattaaaccagtaacaaatccaccgatcatacaaaaactgcttacacgtttacttaattgataatttctttcaccgaatagccgtgaaattagtgaagatccaccgagcccaaaaatgtcagaaacagcgattaaaaaagtaaaaagtggagcaccaatcgtaattcctgctactagatttgtatcacccgttttggcaacaaacatcgtgtctgccaagttgtagatcatggtagtgatcatccctaagacgaccggtaatgctagcttaaagtagaccttttaatcggcgctttagcaaataattcatccataaattttccccccacattgaaaaaagcgacctagaaagatactttgaggtaaacctcactattctaggtcgctacgttatatcatttatttaattttagcatattgtgttaatttgcgaggtgattatctaaattaaagttaccttgaaattcatcagtagtgctttcttgatccataccatattcggcatcgtcgccccagtaaatgtattgtgcgtttttacctttggtgccagcaattctgaagtaaaggccagcttcatcaccttcaccagtggtcttggtggcatctaccttaactttttgaccaatcttgagcaacttgctggttgatttaagcttattattcaaaacatggattttgtttaaaatagtggcggtagtggtgccagaagcttggtaaagggtgttgccgttgacaaagccaacatttgaagcatagatataagcgccattacctaaggcgtagaatggcttacccttgatagtggttgtgttcaaacttctctttttagacccgctaagatttgagaagtagtaaaatacgtcattcttagttgtggcgtgggttttagctggtgttttaactaacatatatttagggatgagtgacaaaccattgaaagtagtgcggtgaccgtttttatcataaatgcgagagttggaactcaagattaaaacattttgtccatccattgagctaacattcaaagatttgatgtagcgttttttaccgatgttaacgtaagaagcggtagtgtagtggtagttcttagaagtttttgcatctacttttttaccttggatcaggataggcttgccataatatttaaaacttgagcctgatttaatcgttgaagcaacagtcatcttcttgccattgactttttgggtagtggtagtggcattgcctttgctgttgaagacttgaactgtgccgttaaaggatttcttgagagtaactttacctttttgtgattgcgtagctgcttgaactgtgtgaacaggttgattgataatagcagctgctggtgcaacactgattaataaagctgctgcgatagttgctaattttttagtagtcatattttgtctcctttgtaataatcccttaagttgattttagcacttatgagactataaaaataacctcgaaactcaaacgttttcggggttatttgattttattcacttaagtacttaggatcaataaatttattgatcacgttgttaaccttctttgaattattgtacttgcggataatgttcaagaagtcttgtgcagttgcttgcttcaagcagtaagtttgatagtaatcgtgtaaagcatcgaagaacttgttttcgcccatggcaacctttaaaacagcagggaagtccatcccaagttcgtaagccatgtcttcagtgtcaacgccctttggtggattattaacagggtagttgatgtagttggccttttgattcttattaatgaattggttagcattttcttttaagattttgttagcacgcttgacgttcttacgagtatagaacttgctgtgcatcagtttagcacagtaagccttactcttagtgtaggtcaaatcgtaaacgccattttcaaggatgttggtaagaccttcgtcaagccaaggttccatgtattcgtcgctgccgacagtgccgtagaaccattggtgaccaacttcgtgagaaacatcttcagttaattcattatatctatcaagtgggtgcttctttagtaaaaagccgctggcatcgatcatgatcaagccaggatattccatcccaccggtatctttgctaagcaagccttcagtaatatcgatttctttgtaaggatatttgccgatctttttggtaaaaatgtgaaaactgtcttgggcagtcatcaaagcaagcttgttgtattgcttgctgtttttgcttgcaaggtagtagtcgttgattcttacgccgtttgcataagcgtggtcaatcttgaacttgttggaagtagcgattgcgaactcacgcatgttgttggcggtaattgtagttttgccatttttggttgtgctttgaccagaagcggcaactttgtagctctttggtgcgaagaagctaacgtggaaattgcttacagcactgttgcggttttcaccagcatcgtagtatgggtgataattccacttaccgttgcgataatcgcttaagtatgggaaacagaatgacaggttataaaccttaccgccgttgatattttggtagccaaaacgatcttgtctcttaggcacgccggtaactacgttgacagttaaatcagtagattcacctatatttagacttttgttaacaaataaattgctcttgtctttaccggtagtgtaagaaagcttttgaccatctgatgaaatgcttttaactgaagttgtcgcatttcttgtagcctcaaaatgcttgtggtcgtatttcaacacgccgctagcaatatttctaaccaataaatttttaacaggttcattaccgttattaacaacgtgcatggtaactttttctgttaattgattcttgcgagtgtccaacttcacgatcatgttgtaatttgttgccttgatcgtaggatcagccgcagcttgaacttttgagttgaagctaaataatgccgcaatggttactgcactcgacaataaaagtgttgttcttcttttcataattttccctccaagaaaaatttattctaattattggaagttatcagcataaagtcaatctattttttgatgataggatataatttatgtataagtgaaaatgaatagatataaagaaagaagataaataagaatggttaaaagtattacacctcatttgttttatcgcttgaatgggatgcaccatgttgtagcccaagttggtgtagtaaatggtgatcatgtttttgccttgcaacttcttcacagtgcacatgatgtgttggtttatagaaaacatgaaggtttaactaagaacatcgattatactgatccacacttagtaatgatgggctttggccacacgcaaacctgggtagcagctaatgacaaggatgaatatttcgtaggtgctaaaccaaattcaggcaactggactactcaaattgcacgagtaaagtacccaagacttttaccagaaagatatacttcaaatacacaacttccacgtttgtcacacttgaatcacgtaaccgacgttccttatgatggtcatgatcacttgcacagagtagaagcttcagtttcaccaaatggcaagtacttcatgattgcttcaatttgggatgatggttcaggtcactttggtttgtttgacttaaatgaagtaaaccaaaagttgaatgaaaatggcactaagaacacgccaattactgatttgcattgccttagtgcttttcacattgataactttgatcatccaagcgtggcaccaagtgaagaagctccacaaatgattgattctgttcagggctacgccattgatgatgacaagaatatttatatttctaaccaattgtcacccaagattgatcatgcgaatggtgaagttactacttggtcacgtaagatcgttaagtttccatggggtgaaactaatccagagaactggcaagtagcaatgattgatggtattgatttgcctgatcgctacagtgaagtagaaagtattcatgttcaggcgccagatgacatttatctaactgtggcttaccaccaaaaatatgtcaaagatggcgagtttaagttaagaactttggagaatcaaattttccacattagtgatttaggctaaaattagattcttgagactactgcaaaaggtagtctttttatttttgtaaaaaagctatgcaatttatatgcaaacgatatataatagtggtaaatagaaaggagagggtaccatggctgagaaaacaactggactttatgtcagaatgaatcctgaaaagaaagaaaaagcagaagcaattttaaagcaattaggtttgaattcagctactgcaattaatatgttttatgatcaaattattttacgtaatggtattccttttagagttgagattcctaatgcttgggccaacttggactacatgaacaagtatgagtatgctcatctacttgatgaaaagcttaaccgcttggcagagcagaccgatagttcactaggtgaattagccaagggagtcgatcccaagaagaaggacgagtaatttttagttgaggtataaaaatgggtattgttattacgctaatcgttttagttttagttattgcatatatttgttgtggttttagaattgtaccccaaaataatgaaggcttagttgaaacgttgggtaaatattctaaaactgttaaggctggctttgtctttgtttggccattatttcaacgaattcggaaagttccattggcattgcagccattagaaatttcaaagtattcaattattactaaggataatgcagagattactacttccttgactctgaactacttagttactgattcataccgctacttctacaacaacaccgattcagttgagtcaatggtgcaattaattcgtggtcacttgcgtgacatcattggtcgaatggatttgaatgcggctttaggttcaactaaggaaatcaatgatcaattgtttacagcaactggagatctaactgatatttacggaattaaggttgtcagagtaaacgttgatgaacttttaccaagtccagaaattcaaagagcaatggacaaacaattgactgctgatcgtgagaagaccgctgctattgccaaagctgaaggtgaagcaagaacgattgaaatgaccactaaggccaagaatgatgctttggttgcaactgctaaagctaacgctgaagctgttaaaacacaagccgatgctgatgcataccgtgtataaaagatgcaggatgctttagctaaagctggggaaggctacttcagaaatcaaagcttagacagcttcaatcaattagcacaaggtccgaacaacttgattgttgttggaaaagatgagatgacagatttaggaaaggttccagctttaaagaaagtatgggatgaatctggcagtcaggatgacgctgaataatatggaaaagcacttacgtgcttttttgttttgattactgattgataaaatccttttttgacaaagaatttaattaaatttttgagtaaaaatcgtaattaacagagattcactattttactaaaacaacatgctgaaagattagtatgaaaactggtaaaatagataagtaaaagaatagatctatttgttaaaagggagataaaatggctgataaaaaattacttctaatcgatggtaactccgtagcttttagagccttctatgcactttaccgccaactagaatcattcaagagcccagatggtttgcatactaatgccatttatgcttttaaaaatatgctcgatgtactcttaaaagatgtcgatccgactcatgtgttggtggcttttgatgtgggcaaagtaacttttagaactaaaatgtacggtgactacaagggtggtcgggctaagacgccagaagagttgttagaacaaatgccgtatattcaagagatgctacatgatcttggtattaagacttatgaattaaaagattatgaagccgatgatattattggtacttttgctactaagggcgaagaaaatggttttattactacaattgtaacaggagaccgtgacttgacgcagttggcttcagacaagacaacggttgaagtgactaagtcaggtgtatcacagcttgaggcttatactcctgaacatatgaaggaagtaaatggtgtaacgccaactgaattcattgatatgaaggctttaatgggagattcatcggataattatccaggcgttgaggggattggtcctaaaacagcttctaacttgatccaaaaatatcatacagttgaaaatctgtatgatcatattgatgacttgaaagcttctaaacgaaaagaacgtttgattcgcgataaacacaatgctattttaggcaaaaaactggctacaattgatcgtcattctcccgtgacaattgatattgatgacgttaagcgccaaccaattgattatgaaaaattacgccaattctatgaaaagatgaatttccgtaagttcttggcagaactgaatgctagcggtcaaggccaagatgcaactgaagtagaaaaagttgaatacacagttcttgatgaccaaaatgtcaagaaaatcaaagctaatgcagatgaccaaattgaattttatcttgctatgctaggtgctaactatcaccttgctccatttgtcggttttgctttaaaaatcaattatcaaatttacgtttcacgagatgttgaacttttacaagagactaatttgcgacatttattagaagatgagcaaattaagaaaaatgtctttgatttaaagcggacaatggttggcttacatcgattaggtatccatgttcacggtcaagattatgatatgttgttagcttcatatttgatcaataatgaaaataattccaatgatctaggtgaaattgctcacttgtatggtgattattcagttaaaaccgatatagaaatctatggaaaaggcaaaagtgagcatgttcctgatgacgatgaagaactatttaatcatttggcttcaaaggttaatgctatcgaaaacttgaagcagccactacttgagaagcttaaggaacacgaacaagatgacttgtttgatacaatcgaaattccgactgctcgtgtattagcccggatggaaatcaacggaatgaaagtggaggcaagtactctgctcgaactgcaaaatgaatttgctgttcggttaaaagagctggaggataagatctatcaacaagcaggcgagcgctttaacttgaattcacctaagcaattaggtcatattttgtttgaaaaattgaatttaccagtaattaaaaagaccaagaccggttattccacttctgttgaggtattagaccaattaaagacacaaagtccgattgttagtgaaattttagattatcggcaaattgctaagattcaatcaacttatgtcaagggcttgcttgatgtgattcagccagatggtcgcgtacatacgcgttatctacagacattgacagcaactggtcgactttctagtgttgatcctaacttgcagaatattcctacacgaactgaagaaggaaagcaaatcagaaaagcctttgtgccaaccaatcctgatggttacatcttctcttgtgattattcccaagttgagttgcgggtattagcacatgtttccggtgatcagaatatgcaagaagcctttaagacaggctatgatattcactcacatacagcaatgagaatttttcatttagattcaccggatgaagtaacgccattgatgaggcgtcatgctaaagccgttaacttcggtattgtttatggtatttctgattatggtttatcaaagaatttaggtatttctagaaaacgtgctcaagagtttattgacaattactttgaacaatatccacaaattcgtgaatatatggataaggctgtgcaaacggctcgtgaaaagggctatgcagaaacaattatgcacagaagacgctacttgcctgatattcatgctaagaaatttacagttcgttcttttgctgaaagaactgcgattaactcgcctattcaaggatcagcggccgatattatcaagattgctatgatcaatatgcaaaagaagctagatgaactacatttgaagaccaagatggtcgttcaagtacatgacgaattgatttttgatgtgccaaaagatgaattagaaacgattaagaagatagttccagaagttatgcaatcagcagtgaagcttgatgtgccattgattgcagattctggttggggtcataattggtatgatgcaaagtaggtgatttaatgccagaaatgcctgaagtcgagacggtgcgacggactttaactccgctaatcgttggaaaaacgattaaaaaagtagtactttggtatcccaaaattgtggcaacagaccataagaaatttatcaaagaactaccaggtaaaagggtcttaaagattgatcgctatgctaaatatttactgatacgcctaagtgataatttaactattgtgtcacatttacgcatggagggaaaatatcatttaaccactcccgatgcgcctaaggataagcatgaccacgtagagtttatttttactgatcaaactgccttgcgttataatgacgtgcgtaagtttggccgcatgcagctgattttaacaggtactgagcgccaagtgacggggattggcaaactgggccctgagcctaatagcatagaattttcgtcagattattttatcaaggccttgagccgtaagaagaaaaatattaaaaatgtcttgcttgatcaaacaaccgttgcaggtttaggtaatatctatgttgatgagacactgtggcagagtggaattcatcctttgagtgccgcaaataaaattccagcagaaaaagcaaaagagctgtggcagaatattaaccaaactattaaaattgcaacaaaaaagcgtgggacgactgttcatacttatttagatgccaacggaaatgttggtggctatcaagaaatgctcaaggtttatggtcatgcaggtgaaccttgtgcaaagtgtggcacggaactagaaaagattaaagtatcaggcagagggacaaccttctgtccacattgtcaggtggtttattaatgagctatgttttagccttaactggtggtattgcaactgggaaaagtacagcggaccagttttttaaagcaaataaaattcctgtgatcgatgatgatcagattgctcatgatttgatggagcctgggcaagcttcttggcaggcgattaaagattattttggctcagagtatttaaatgatgaccaaacgattaatcgaaagaaattagggcaattggtatttaaggattcgcgggctttaactaaattaaatgagttaacgcatccgttgatttttttgcaaacaaagaaattgctaaatcaatatcaagctcaaccaatagttattcttgatgtcccactttattttgagtcagggatggataagaaagatatagctgacggtgttttagtgattactttgcctgagaaaatgcaattacagcgtttgaaggagcggaatcatttaaccgatgaagaagcaagaattcggatgcaaagtcagttgcctatggtcaaaaaagagcaattggctgattttgtgattgaaaatactggtacaataaaagaactagagaataaactagcacaattattggtaaagattagagaagagggatagctatggaatgtccaaattgtcatcaaaatgcttctcgcgttattgattcgcggcctagtgatgaaaaccgggctattagacggcgcagagaatgtgaaaattgtggttttcgctttactacttttgaacgagtggaaactgctcctttgttggtagtaaaaaatgatggtactcgtgaaccattcagtcgaaagaaaattttgcacggagtaatggcagccggacaaaaacggccaatcagtagtgaacaatttgagcaattggttgatcgtgtcgaaaataagataagaaaacaaggcgttagtgaaatttcatctaagaagattggtcagtatgtcatggatgatttggctaatttggatgacgtagcttatattcgctttgcttcaatttaccgtgagttcaaggatatgtctagctttatgaagacaatggaagatatgatggccaaaaaaggaaagggtaattagtcatgttcgcaacgtctgatcctaagcatctttattatgtagccaacaagattaccctttttccagagaatgagaaaatcttgattaaactgtatcagcctttggttggcgcggtggcaattgccttgtatcagactttgatcaatgactatgatccatatggtattgtttctgattcaaagggaatttattcactacaggagcaacttgattgtagtttaaaagatatgtttcattctttgcataaactggaagccgtaggtttagtgcaaacttttttagcggataatgtcttcaataatatcattgtttttaagttattacaggttcctagtgcagacaaattttttgcaacaccactgctagcaagtttgttgaaagaaaaagttggcagcccaacctttcatgacttgagtcatgcttttgctaaggaagcaaaactgcgtgaaaagccaatcaagaatgcgcgcgatgtctcagccaacttttttgatgtttttcgcttgccaggggatgaagcaattaatccatctaatgaggtagtagaagctgcgcaggaaaataaagcgcctgagatagaaactgctgaaattaatgcccaggatccaattgattgggatctgattaaagatcaatataatgtctatcaaattccagctcaagaagtagaaattaaaaagaaccaaattcggggcttaatacagacatataatttatcggaacaggaatttgtggatgagactgttccctgtttgcatggtacacataaattaaacatgcatgaaattagtaataccatagcagaaaattataaacgattgcatactagggaaaacattcaaaaacaaattgaagaaggcaaaaagcgcgctattgcgactatcaaaggtttggatgctaatgatagaaaactgttactcgaagctaatgaaaattccccatctgaatttttatacaaattaaaaactgaaaagggtggaattgtagctccaggcgaaaactatattattaatcagctgcacacgcagtatggcttgccggaagatttgattaatattttgattcatacctgtttgacctacgatactgttgtaacttctaatcgtgcttatcgaatagctaatgattggctgcaaggtggtattagtactggggtacaagctcttgaatatgtgaagaagcgtaaagccgatattcttaaaaagaaaaatcgacagtcatatcgacaaaataagcgagtcgaaaaaggtaccgattggagcaagaaaaaggctaaaaatgaaggtatgtcaacagaacagctgaaggatatctttaaggatctgaaaaataagtaaatagagggtaggtgaaataatggaagcaattggtgatttgcttaaaaaaatagttaaagagcgtaatttaggtaatgagaaagaactgttgaaaactgctttacacgatccagatgtgcaagcgtttttgcaggcaaatagggaaaaaatagataaggcgatgattcgaaatagtatggccaatatctatgaatattatgcgcaaaaacatagtcagaatcaggtgctggccggttatgctccgcaattatttttaaacggcaaagtaattgatgtacgttataaacctaccgaggctaagattgtagcagatcagcaacgagcagccaagcggcgtcttcatttaattgatctgcctgctaaattgcatgatgttaatttaagtgatattgaggttacaaatgatcgccagcaagctttaaccctgatttatgattttttgaaaaagtacaaagctgatcctcaccaacaaggcctttatttgtcgggcgactttgggatcgggaagacctatatgctagcgggacttgcaaactatgtagcaactaattttgatcggaatgttgtatttttacatgttccaacttttattgcaggtttatcaagtcattttggtgataacagcttgcaagatgagatcaggaatttagctgaatgcgatgtcttaattttggatgacattggggcagaaacattaagtcagtggtcacgtgatgacgttttaggagtaattttacaggcaagaatggataatgttttgccaacctttttctcttctaatttagatatggaagcattagagtcacactttgaggaaacccgtaatgcaactgatccagttaaagctaaaagattaatgcaacgagtacgttttttagctaaagaagtagtagtttccggtcccgatcgacgaaatttttcgcattaatttcaaaaagttcttgcatcgttcactttgatgcgtataattgaagttaattaaacgagacatgatgatgttcggctcagagagaaggacctagttctggaagttcttcattagaaaatcaccccaatcgtttattcccaaaattgaattttaagaggctggatacctttatcaatctatacgagaggttagacgtacgctaacctgaattttgggtggaaccacgcaattaacacgtcccagtgcttttattagcactgggatttttttattggaggtaaaaatatgagtttttcaattactttgccagacggttcaaagaaagattttgataaggctgtttcagttaaggaagtagcttcatcaatcgctacatctcttggaaaagctgccgttggtgctaaagtaaatggcgttgttaagccacttgattatgaaattgacaatgatgttgaagttgctattcttactgacaaggatgaagaaggcttagacattttaagagctactgctgcttttgcacttgaagcagttgctaagaacaagtacccagaacttcgtttgggtcaacatgttgctgatgaaggcggcttttacgtagatactgacaaagatgaccaaattaaggttactgaattgccagaacttgaaaaggctatggaaaaattagttaagagtggtcaagcaattgaacatgttgtaatggacaagtcagaacttgaagatattttcaaggatgacccttacaagactgatcttttgaagaaaattgatgctgacaaggttgatgcttacaagttaggtgatttcgttgactttggctttgatgctttattgccaaacactggtaagattaagcacttcaagcttttgtcagttgctggtgcttactggcttggtaaatcatccaacccaatgcttcaaagaatcttcggtactgctttcttcaaggaagctgctttaaaggaagatttgaagcgtcgtgcagaaattaaggaacgcgaccacagaactatcggtcgtgaccttgacttcttcttcgttgatcctaaggttggtgctggtcttccttactggatgccaaagggtgctactattcgtcgtgttgttgaacgttacattatcgaccgtgaagttgctgacggttatcaacacgtttatactccagtattaatgaaccttgatgcttacaagacttcaggtcactgggcacactaccgtgatgacatgttcccaccaatggacatgggtgatggcgaaatgcttgaacttcgtccaatgaactgtccttcacatattcaaatttataagcaccacattcgttcataccgtgacttgccacttcgtgttgctgaacttggtatgatgcacagatatgaaaagtcaggcgctttgtcaggccttcaacgtgtacgtgaaatgactttgaatgatggccacacttttgttgccttggatcaagttcaaactgaattcgctaagattttgaagttaatcatggacgtatacaaggacttcgatattactgattactacttcagactttcataccgtgatccaaagaatactgacaagtactttgcaaatgacgaaatgtgggaaagaagtcaaaagatgcttaagggtgctatggatgaccttggccttgactatgttgaagctgaaggtgaagcagcattctacggtcctaagcttgatattcaaactaagactgctttgggtaatgacgaaactatgtcaactatccaacttgacttcatgcttccagaaagatttggcttaacttacgttggtcaagatggtgaagaacaccgtccagttatgattcaccgtggtattgttggtactatggaaagattcattgcttaccttactgaaatttacaagggtgcattcccaacttggcttgctccagttcaagttaaaattatcccagttaaccttgatgctcatggtgaatatgcagaaaaggttcgtcaagaacttgctaagcgtggcttcagagcagaagttgatactcgtaacgaaaagatgggttacaagattcgtgaatcacaaacccaaaaggtaccttacactttggtgttaggcgacgaagaaatgaagaacggtagcgtaaacgtacgtcgttacggtactgacgaagaaatttctaagagccttactgattttattaatgaaattgatgcagatgttaagtcatactcaagagaaaattaattaatataattaaaaaataaaataaaaaaacgtatgctatgccaggtctaattaagatggctttattgcatacgtttttttggtaaagctaatgtaattgattttttacgtttgtaagtaagaagtaaaagaactgtcatcccctttaacttttatgaaatattttaatgaaataatgaaaataggagttatataaggaaaggtgataaacttgaaaaataagctcattatatttatgacaactgcgctattcatgttagctattattgtaatgggtcaaaatagagtagatgctgcatcctggggagctaagaatttatttactacaccaaaggaaactcgcggaacatggtactataagcaagaaggcaaaataaagaagcttaaaattacaacgcatacatttaataaaatcaaattatataaaatgttgagcagtaatcaagcgattaagtggactaaaaaattagctaaaactgataaaaagtcggggtataaattagctcaaaaagttggtacctctcaatacgaagctactgattttaaattttataaaacagcaggttttgctgccaatggttggctttctagtgatagagctgattcaggacacacttatgttgctataaagaaaaaagataaaagtaataatgataaagtagatgcactgcggagactgtaaaatagtttgtgtaaggatgaataattccttaaatttatttctttaaacattagaaaaaggggttcctttctcgtatgattggtttgaacaaaaaaacacatacagaaagaagaactccttcatgaatgattttaccaaaaatatagcacaagctctattcaatccagacaaaataaacgatttattgcgcaaagagctacaacaggctgttaataacttgctagaagctgaattgactgcctttctgggctatgatccctatgccagaaatggctggaatactggcaattctagaaatggtgcttatttccgcaaggttgatacccagtttggaccaattgaagtgcaagtgcctcgagatcgcaacagccagtttcatcagcacacgctgcctgactacaagcagcactcggatatcttggaaagcatgattatcaagctttactccaagggcgtgaccaccagggaaatagccgatctaattgaaaagatgtatggcagccattacagtccagctcaggtatcaaatatttccaagcagatgattccaaaggttgaggcttaccacaaacgcaagctaagcgacaagtttttctgcgtctatttggatgcgacataccttcctttgcgccgagaaacatttgagcgtgaagcagtctatattgccattggcatcaagcctaatgggcacaaggaggtcattgactactgcattgcgcctagcgagaacattgaagtctggacagatatgcttcaaaacatgaaatcccgaggcttaaagcaagttgagctttttctttctgatggtgttgttggcatgaaaacagccttggccaggacttatcctaaagctcattttcaacgctgtttggttcatgtcatgcgcaatatctgcgctaaagtacgcgtcgacgatcgtgaaaagatcatgaacgaattcaaacaggtgcatcaacagacaaacaaagaagaagccacagctgtcctgcatgacttctataccaaatggggcaaggtttacagccatgttatcagaagcttgaaagacatagaaccagatctgctggtcttttataactatcccaagcagatcagagcttcaatttattcgactaacatgattgaatcatttaacaatgtgatcaagcgcaaagctaagcctaaggcagagtttccaactgaacagtcgcttgatgcttttattggcattcaggcaatgagctacaatgaccgttatttcaatcgaattcataaaggctttggtcaggttcaggacaccttagaatcctactttgattaaataaataattaaaaaatcaatttacgagaaagaactatttacacaaaagatttgacagtttcgcactgcgagtaggaaatggagcagataattcatttttatattattgttataagagcaaaaaattaatcaaataagttacccggatttaaaattgaagtgcaacactaattgttaaacaaaaaggccatgaagacctaaacttgaagtgaccaaaaatcaagaaaggaagatcttcatgaccaactcaaattctagcatttccaagcattatcatcaattgaacagcgaacaacgtggacaaattcaagctctgcttgattctggcataacctcctgcactgctatcgctcaagaagtaggctgtcataaatcaactatcagccgtgaaattagacgaggcagtgtcctgcaaagagacagcagctatgtcttgtatgagcactattacgctgatactgcacaaatttatcatgaaaagcgccgcagaaactgctataagtgtaatccactgcaacactatgccgtttttttcagaatgctaagcagacgctttaaagccaaatttgatgccactagcattgatgaattcgttggtgaatttcacaggattatgccaaattatccatgtcctagcacgcccactgtctatcgttatattgatcaaggattgctggatataagcaatatcgacctgccaatgaagcttaaaagacgcagaaacaaacgccatcatagtcatggtggccatgctccgcataaaaagaatcttggcaattcgattgaacagcggcctaaagaagttgaaaacagaaaagttcccctgcactgggaaggcgatttggttaaaggcgtcagacgtaaaaatcaacctgccttaatgacactgactgaaagaaccactcgttttgaggttgttatcaaaattcctgactatcgggccagtacttgtcaaagactgcttcaaaaggagattgacagacatcctaattggtttaaatcaattacgtttgacaatggttctgagtttgcggatatgaccaaaatcaaaggatgtcagatctactttgctcatccatattctccttgggaaagaggcacaaatgagaactgcaatggacttctgcgtcaattcttccctcatctccatagataaccgttctagatgttgttctagagcggtttttgttttgcagaggtatctaaaaggtatccatttaattaaatttgatctaaaatgtttactatttgttgatcagattgttgttttaattcgtctagcatataagcgtaagtattagctgtaatactcatgtttgaatgtcctagtcgtttacttatcgagtataagtcaactcccttaaatagtaacattgctacatgagtatgcctcaaactgtgaaaatgaaaaccatcttttttaatcttattttttgccagttgttttctaagaactttgtttacagcatttgatgaaggaatagttccatcctttccgatgaatagtcgttcatgatgattaacctttagttgatctaaaatattcaataaattttgatctaccttgatgattctagtagatgacttatttttcgtttctttatttatgtcgtcagaatcataattgattattttattattatcatagtcccacgatttagagatactaatagtgtgattcttgaagtcgatatcatgccatgttaacaccttaatttcacctggacgcattccagtataaattattgttagtagcatataacgactgatataagagggagtaatatcttttaaaagtgatttttttagtttttgaacctctttaaagtttaaatattcaatttttcttgaacgttcctcattccatgtaagattaatgcgctcagtaaaattaattttaactaatccttcactcattgcgtcttttacacaagttcgtattgttccgttagtcttatagaccgtatctttaacatgcttttttccatacgaattcataaaatgttggtaagagcggcgagtaatttttgaaattctggttttaccaaaattctgttgtagtaatacataaatgtgcttatatctattttgagtgttgtttgatttgccaggaattttataggtctcgtaccagtccttaaaataatcagcaaaaatggggtcttgattagatatttgattggcgtcttttgcaacttccatttcattagcccattttctggctgcagatttggttaaaaacccctgttttactttaaaacaacgcttaccttgctcatcataccaagatacttgtgcccgccatttagtgcctcttttttcaaaatgcgccatcttatttacctcttaaatttaaattattcatatgttatttatgcattacgtataagttacttatatgctgcttatataaattgccccgtctactatagtgaagtaggcgggtatttttgatagttagtaatatttagtttggtcatagactcattcttcaaatttatatttacttagttcttcttgtacttgaaagtaatcctttgtcccgatactttgggcaaaatttagccaattagcggtttgaagatcattacctaacgcaaagtattgtttgactctttcatgtattaaaaaggaattagcactatgttcactacaagtgtgtgcgcagtcgtcgctttgataatcaccttgcacatccttgtcgtacatcatatgtcccagttcatgtagaattacatttttagcttgctcatcatcatagcttgagttaactatcatcacatcaggcttattatctttaccatgaacaagcaaacctgggcagtgtagaggagcaaattctaatcttatgtgtgattccttaagtatttttttaagttcagtgtccataatgcacaccttttcctatttttcattgtaaattctctttagaatatctctgactaattctttatcgtggtcgtccattggtttgccatcgaagaatctagcattattaatcatttcacttagatcggtgtcatttgctgaaccagatgtttttcttccgagtaactcatcagtacttacttgaaaatagtcagctaatatttttaatgtatctgatccaggaattgctcgacctgtttcccaagatccaatagtttgttgagaaacatgtaaaatttcacctaattctgcttgatttaaattcttttgctttctaagtgttttgatattatttgctaatttctttctatcataatctttcattttctaggctccttaactattaatttacatttatattactactaatactaataaaaatagtgaattactactaaaaatagttttaatttgatttctatcttgaaatactaattaaaatagtataatatataaatgtagttaaggggaggtattaaatgttaactaagcttaaaattttaagagttgaaaaaggcatgagtcaatcagatctcgcacaagctttaggtacaacgcaagttacggtgtcagcatgggaaacaggtagatctactccaagaccacctatgatgcaaaaaattgctgattattttggagttagcaaagatgatattttttttagagcttttaactactcaaaatagtaatacgctgaacaatcaagcacttaaccaataagaatagtaaagggaggataacagatggaaaatgaatttaaaggatctaaagcatttctgatgattccaccatcaatttcacgagatgaagatttattaagaaaacctaaatcgatacttttaatgggtgaaattatctcaatgcttaatgtcactggcaatttttttatgagtaaccaaaaaatcgcagaacatttaaaagtatcaggtcgtcaggttaatagatatttggatttgcttgaaaagaaaaaattaattgagcgtgaaaaagttgttagtgataaaaatggtgcaattttaggaagaaaaattcatgctggttcagcccttatgacatacatgtcactagggtggggaactgagcgtcacaagggtagtgacaccaatgtcacacccccagtgtcacccatgtcacataaatataacagagttaatagatcatctaatagaacagttaataattcttcttctaggaagaaagaagaagatccagaaagagaaaaaatctacaaagaatttttctttattgcaagaataaacgataaacgcaaaaatcaaacaactagaccatctcttgatgaaattaagcaaatgagaaagttgctatatgaatgtgatgttgacactctacgagctgtgaaggataaattcaaagagcgaatggagtgggacatggtcggtaaaccatttgcatatttactcaaattgctaagagatggtttagcaaatgacaaaaattatgaaagctggggataaagatgcaagaagatatgactaatgcgctaatcaatattccaagtcttacgaattttattaaaagtattgttaaagaaactgtcaaagaagacaagaatgatttaactggaaaaacttggaatatcaaacaatttagagaaatttgttgtcgtggtaaaggcgataactgggtgagaacttttatatttgatgagtttccagaagttgattacaagaaagggggctttgtagtaaatcctagaaagactcctgaaggcaagacaacaatcattttcgctaaagaagcctgtgagtggatgcaaaaacatcaacatgagattgattggaatgcaaagatcactagctagatcaaaagcaataaaaaacgctctacaaaatagcagaacgttagagatttagaaaaaatggagaaaaacaatgaaattaacaggtaaaaaagaaaattttgatgaatttttattcaaagtagacgagttaggttacgccattaatgacttactccctgctagctggacattgaatttaagtgaatctactaacaagttaagtgaattacttagtgatagtcatctaaaaattaagcaaaaaaccgtgacatcaacagatagtgtggcaattcagattaaaacaagtctacaagacacagaattgcaagtatcagctagttcagttgtgacgttagaatcagaaaatcaactagagtatgttttgaattggtggcaatggcaaattaattgtcaattagcattaattgctgaaatttcaaatgtgtttgaaactacagaagaatatgaagttagttagcattttctaagacagatttgattaatgaaatgattaaatccgtttgctgatcagttaaatcagttggtaaaacattcagtattttagtctgttgtggggttaaattggtggagatatctgctaaagattcaacgctaacgttaaataaagctgctagtttagctatgttttcctgggtaggggtatttacccctgctaaccatttataaactgtaatcggctttaaattaagcttatcagctagttctttaacagataaattgctagcttgaattaattgcttgagagaatcgatccgaaagtttaattcaggatcatcagttttttttgctaaattggctaaaaaatcttgagttggttgatatgaagggtcaatttcatttggattaacgtgcagcgctttagcaatcttaatgagattgttttgtggaattgcaccatttcctaaataatatcgattaattgaaggaatggggattccagttaatgctgaaagttcacgttgagttaatttttgattgaataataaccgttttaagttagcacttgttatggcaatgacagattgcttaagtttatctttcataatattacctctaaaaataaaaaatacggattgaatcattaataatatatcatttttgcgatacctttgtataaaactaaaagatattgatataaatgaaattaactagataacgaggaaagtagaaaatgagtccaagaaataaaaaagttgcacaagatttacttaacgataagattgatattcagcaaattgaagataggttgttttgccgttatgctgctcggtatgtcagataactttgaattgaatggacaacagcttaatgaaaaacagaaattagaattaagtaattatttggtgggtgaagtattcgggttaatgggaaatagctctatggttttgaaacaacggctttatccagattatgttttaaaaattaacgttttacttaaagaaacttaaacttcccacactaaataagccagtaatctcttgatcttgcttggctttaggcttctatattatttttgctagttttctttaacaatttttgcatgtatttgggtaaacgattgataaagtcagccgtgaattcagctatttgtgcttcactggcatgaaagacttgctttacgctggccagcattgcatcagtaatcaattgcaaggaatggctaaaagtaatgtccgccagctcatcaatcatgcaatagaacagctcgcctagcgtgcgttcatcttcatcgtcccgcttggcaactgacataagcatgtagcgagtaaaaactatggcaacatgagcggtcaaagcatcgtaagacaggccatgatattccgtacttagttttagataacttttgcaagttttgaaaaaaacctcaatatcccaacgcttgccgtagttgcggataatttcatcttcgctaagcgacatgtcggtacaaatgattgccagccaatccttgcgattggcacggtttctaacgcagacaatccgtgcatctattttagcaccgtctttgtcctggcgtccgactttgactgggattgacagcaggtagcgagaacggccgcatcgctttttacagctgcgataaatctgtttgatgtttttgcgttctccctcaaattcatatttgattttggagctaaccttaaccatggcaatcacatccagcttcctttgcttgagctggacgatttgatgtggatttgagaaccagctgtcaaacagcacgtacttggcttgatgacctgctttcatagcttggtcgattaaattaaccatcacgtctgtgcctttagtccgggcaagcatacgtctttggccagcaatggtgcgctgatcaaaaactttattttcgccaatcatattctgtagcttctgagaagacagcagcactgaattgattggcatgaaagaagctccatcagtccagcccagggtcatcatgcgaaaacctttcttgtaagtcattgatacatggtcaaaaactttggcgactaattctgttttcttgaagccggtcctagagaagtaggaatcatcgacaacaaagcaatcagcccgtttttctgaagtcaaagatcgcaagtggttattaatgatttgcgcagacagaagtgtggtgaagtggagccaattgacgtgaacgttgcgcataaaacggtaatatgagttcttggaaaaattttcttgaaaatgatccattttcagctgcatatataagctgcggtcacgaaagacattgcttaaaacgtaaagaaacaagctgaacaggctaatgcctttttccttgcggaagccacattttctcaacagcttgatcacctgaaacttcttgatgaagctgatgattgagtttgaaaatagttgttcattttgttggtcaggagatggtaaaatagacattggcacaagcctttcatgcaaataaattatgttttggtcaatataattatagcaatgaaaaggacttgtgccttttatatttgtcaaaacacgcagaatcacaatgaaacaagcaattttgcgtgtgggaagtttaagaaagaaacattaattagaaaccaattgattaaggacgtactggagaatgataatgaataagtttgatttgtggtctggtgtgatgactacaccagctgaattagctaaagtctttacttggcgatttagacgtgatgtgcttggaataagaccggtagatagcaatagttttgatgtctgtgtagaacaaataaatggtcaactaattagtattagagctgatcaaaaaatcaaatatattggagctggtaagtggcttgtagtgattgagaggagcaagctatgaaaatatttcttagtacatgcttatcttattttctaacaagtctaattgggctagaagtgttgtttagacatctggaacttaaagacaaatatgttaaaagaatgaccagccgaaataaacagattgtagattatcgttttgtttcgcttaaagtagtaaattcaagtctgagccaagggacagttaccttaggcttgctatcaaataagcaacattcgtttgaagctaagggtgaaccattgttaattaaggcaactgtgccccatgagcaaataaagttgattagagctaaagatgttcatcaaattgaagcaaatttacaagttgttattgacactacaagcaatgttcctcaaattcagacaaagataatgaggattactaagtatatttaggaggacagcatgtttttagtactttcacaaacagattggttttggattatggtttgggtctttattcttgcttcagcgtttcatctatggaaatgggtttgggtagtttttggaatttatttaattttcccagctttactaacattgatggatggcgtatggagaattgcactagtaattggcgtaatttttctaggaattaagggtgtaactatgggtattgcttggattaaaagaaaaattaagcagagcaaagaagtaaagaaggcaaaagcatgacaaaaataattaagcttcacccaatatagttcggtgcaattgccaattttgggtgtgaatgcaatgttagggtcatttgtgtcccaataagttgttgaaatattttaatttttagcgtaaagttgctataatattagtgaacaaaaaagagagctactgctaatagctctcctagtacgaagccgctaaaagggcggtggcattgattatacaactaaaaagtcgctaaactctgccaaaagtttgtgagcggctttttagtttgctctactttttccacaaatcgtgaaatgctgcaatcatatcttttaaggctttgaaccactccgttacttttttggtaagcaagatgagacttactaccagtagacaaagcagatagattacggctatgacagactgtaaaaagcctgtcatttggcaaactgtacctcctttcaatagattttagggcaatagttaatacaccattggcaccacctccatgaaaacgaaagtaccaccgcttatttaactttttcgtactaaagctattctagcaaattagatgtagttatgatagctagtttaaggatatagaacaaaaattctgtatcttttttatttttagtcttgaaatatcgcaaaaacgatatataatataaatatcaaaaatattttagaagagagaggagcgagaaatatgattaatcaagttgtaatggatggttacatcggaaaagatttagagttaaaaactactcaatctttaaaaaagtatgtaacctttactatttgtcaaaaccgttatagtaaagttcaaagaggctatgttggtgagtggcaccatgtaattgcttggaataaagttgctgaaaacttagtagctaatacacataaagggtcaaaagtaatcttggcaggtgaacaaagggttagaaaatttgtagacaaaaatggtaatagagtagcgtatgaatatatttgggtcaattcatttgatatcttaactagtcaaaatgaggatatagccaatagcccttcacaaaatacaaataaacaaaatatgaataatatggaagatgaagagccagaagttgatcgaactattgtagaagcaaataagcaagataaattagcggaagatccttttaataatcaaaaagaagttcaattaacagatgctgatttaccattttaaggatagtatgattggcgagtgttggatggcaaggaagtcagtaaaaaataggcgctttagcgtattcagagttgaaaaagaagtttatgaaattctgacgatagacgggtaccattactggaatgttgatggactatttataaaagacccaaaatattttttatctctcaaatatcacaaaaccgatataaaatataaagagacaaccttttatcgagtaaatgagatttatgatcaaatttatttaggctttggatttgaagtaaatcctaaattaggacatcgcaggttattgtgtaaaagaaaatatcccgatcatcataggaaaaagccgctaattgatgttagcaagtaagatattatgatcagttcatttatattagaacattttcgatacatagtgatcgcatttggagcggggaatttattcataattattcttatggcaatatcatctttgccaagtttagcaggcacaaggtttgctaacttttttgaaaaattggatgaattagtgacagttctgctatcgattcttggaattattctatggatcatgattttatttatcggatattactggagctatttaatgtaaaactagggcataatttaataggtaaaatgcaagttggaatgaatattggttaaaggagttgctcctcttttgaatcaaaaagttgatattcatatatatccctatttttaatactttaatactcaatacttgcaatgaaagttcgaatctttccgctctaatctagtgagaaaaaatatgtataagttaataacagtcgcagtaggtatttatattgtttattacgtctggcgagcgtattcaaacatgaaaaatttgaagaaaaatatggatgataatcctaaagaactccttattaggtatgatagtcaaattaatgatttgcgaaaacagttaacagaagttaatgaaacaatcgcaagaaatcagggcttcccaccaagtttttccgttaatagggggcttaagaaagccaagaagcaacaagaaaagctactgcaacgaattacacaaaaagaagttgctagaagcaattatttgaaattattgagaagctatcaagaaggaaaaattgataaagcagcattgaagaaatgggtaaacgaaaatcagaggagatgataaacgtgaaaaagtttagcaagtttgctttaactgcgttagctgtgacaggagcaattattgtggcagtagtcgtgacaaatcaagtaaaagaggcaaaatccttagaatgttaatcattaagaaagtcggtacaattattgatttttgatcaataatttagctgttcaactcagctatttcttttaggactggtagacagtccactagtacattgaaaacagaataagcgtcaactatgctctgcaacgggtgtaggacgtgtgcatgactattgagccgactcaataggatttgtaagacagagaattgaaggcacaacgggtggaagaagaaagaatcacacctgccgagatggagatagccgtccatcaataaagattactattatttttggcttgatgataagtcttagtttgaacgaaatttaaaatttaaagtaatagtaatagctgtaataggctactaaaagataagcatacattctttttggctgttttaacatgtgaataccttgatgaaaaactcaagagtaaataaaaagtcggagtgtgatcaagaacagtaagtgagtcaataaacttaattatttaagtgttgtagtaactgaagggcaagaaagagtctttgattaggattgataagaggatagcttgcggaatgcgtgaagcgagaggttagagataggtgaagctatctgctacgtactgtacaaaaacttacagtttgatggctaactaagaaaccatcatcgttatcggtcatagcgtaaaaccgttggtaattaaaaagagatcacaaactataataatagggaaattaagatgaaaagttatgaataattttgattacgttgatcgattggttaatgtaatgaaaaaattagatgttacaagattaacggcggatgagtatgtccgttatcgcaatcaattagcgagggaataccctaaagattttacacctttaaggcaaaaagaaacattagcattacgtgcattactttcccgaaagaatgatcaagtgaagttatcttttacatatgatcgttttggaagatgtacgcaagagtatattttaaaataataaaaattaacggatatcccgctgctataatgttgcgtatgtagtataatgaaagcaggtgagagcggggaaaagttagcgagtaatttaagctgaattatttgaaggaaagaggagcaaattatgtttatgaaaaagaatgtattagtaagtttatctgttgcaacattgttatcagttggagcagtaggtgttaatgaagtaaatggtgttgctaataatacaaatgttgtacaagcagcagtaaaaaatggcaagcttactcataatgcctatatttataagagtaatggcaatcgttatggcaagaaagtattgaagaagggcaaaacagttaagattctcggtacaaagaagatttatggtaagaaatactaccgcattggtaagaatcaatacgttaaggttgctaattttgctaaaaaagtaagtaaagctaatgcagttggtggacaatactatttaactcataatgcttatgtttataatgcagaaggcaagagaattaaaggcgctgacactttaaagaagagtcatatttttacagtagttggcaccaagactattaatggtgagaattacttattcttaggcaatggtcaatacgtcaaggctgcaaatgcacaatcaacttcggctgaaggtgctaataaccaagtaaacaataatgctacagatactgcagtaggtaatactactgacaattctgcaacagcagaaaagaagactaataattctaagaatagtactgcaaacgacaataagcataatagctcaaattctcaatctaaaaaacaagaatggatcaaagaaaaaggttatatctactttactgatgaccaagtatcccaaattcaaaattatttatggcaaaaaatcaatgcttatcgccaaagtaaaggttatcctgcctacaagacaaatccagagttgaataactttgtaaatcgaattatgcaaaaaggtactcctgaatataacgctttaggtgatggtattggtacatttcaaaatactgataccttagctaaatttttacctaaattaaaggcgttaggaatggatagtgcgagaagtcttaatgatttagatgccttcagatataataatgtgaaacagcacttcattaatctaaaagaaagagatcccaagaaagtcgcagatgaaatctttaatgcttatacaagagaagaagacaacatagacttgagaacacttgaaggacataaagataaatatgcttatgctgctttaaaagttagattcaataatgagggagattatatcgatcacggtttggaattaaactttaccgttgtgggaagttattcgccagaatggattaaggcttgggaagctgctaagtagaaattagaaataaaggttaattagttatgctaattgcctttttttgttcctaaaatgaaaataaaaaaaagtagattagctattaatcaacagcgaaaaagtgataaaaagaaaaaaattggtacagtaatagctattattgcgttaattttaattggggttgcgatttactgcattgctaattttgaccatattcaaggacaagctgctaactatgtggcaactaatcatttgtcgagtcaaagaaaaaacaaacagaagaaaaagccaagttttaatatgaaggctgtccaacctgtatcacctcaatctcttgccaatgcatatcagcatagaagagattatcgagctgtaggacaaatagcaataagagatcataatgttctattaaatatctatcgtggagttggtaatgtagaactgaacttaggtgcaggaacaatgaaccaatatcaaaagatgggtgaaggaaactacgctttagcaggtcataatatggatgatgggcgttcgttctttagcccattatatactgcaaaggtcagaggaaatttacctaatggaacaacaatcttactaacagattataagaaagtttattattacaagatcacatcttcacaatttatttcagtttataatttaagattagcttggaataataaagagtttaagaaaaaaccagtgatatcattgtttacttgtgactggacaggtcaaggcagactttttattcgtggtaaatacactggttcacaagattataagggagcttctaagtatgttagaggctcctttaatttttagaaaggaaaatgttatggcaaaacaagtttttgtagatttcgaattaccagaagctatgcttgctgatacaaataaaattattaaagagaagtttcctgcatggctagtagatagaaaagataaccgagtagcctcagttcgaattctgtgggctggctggttattccttaagtattcggaaggtttggctagcaagtatgatggacgttttccatatgtagcatatactccttatacagcggtagatagaccttatgcttttcaaaccgtaatgttggaaagtgaatatattgatgcaatggaaagaatgagtcgtttgtatccagatgtctttgaagataagactaaggataagaattatttcttggcaattcttggttatgcttgcttaagagagttgtatgacaataatattgaattacactatgatacagaaaaagctaatgatctcgctgatagtgaaaatgcacaacttgattatgcatggttagaagatggtacaaataaaccattttctatcaaaatcaagcaattatcaaaagacaagtaattgccaataattatatattattagaaaacacctacatataaatcaatgttttgatttgtgacattgacaaaaatgcaggtgttttttttgttaaattaaggaggaatagccttgaaaaagctatcaaaaaagcaaactagagaattgctatctgcattaggtgtaacagcaactctaggtagtgtgggcgtaggtgtagcagtcgcaaaccataatgcaaaccctaatattgttaaggctgatgcaacagctgatgtgaaatatgtgagtgatgctacttttaaaaagggatcagatattgcttttgatatttactaccaagttccatacaatgcagatctaaagaaattggttcttttcgataaattggagccagtgtttactcataataaaaccagagtttttgatggtaacactgatgttactgatcaatttacggcagattttgataaggggacaaatacaaccaatatgacggctaagaagcctcaagattgggtaggtaagaagttaagcatgcgaattgaaaccacgttacaaaagaatgctaacttagacaagtatttggataagaatacgaatcaatacaacattcctaatgttggtcaaatgatctataacgatgaaaagatcaagaccccacctgtttatgttcatacaccgaatgatgaagaacctactgcaattaagcaagtagaggataagaacggtcaatatggtgaaaaagccaagcatgacgctggtgatgaattccattatcgagttcaatattcaattcctgaaaatggtaaagacattagtaatgttgttttctatgacgatttggaaaaggttcttgatcttgaagacgttaagatcaccgatgacaagggaaatgaagttactaaagaaggggatttaaaacttgataaagataaagaaagttttacttggcaaccttctaaagaatatctaactcaaatgccaaagcatatctacactgcagatattactgtcaagctgaagaccgatgcagatttaagtggatacttgaataaagcaacaaagaattacgaaattcctaatgttgctcatatgaagtacaacaataaagatattccttcaaatcctgttaaggttgaaactccacctccagccgaaaataaggtagttaaaagtgttcaaggactatcaggttcctatcatgaagataaagataatgttgaggttggcaaagactacacttataagattgactatactacaggtgaagggcaacatttaaccgatgttgagtttaccgataagttagaagatgtccttgaccttgaaaaggtagttgttaagaatgccgatggtaaagatattaccactgaacaaggtacacttaagcttgatgaaaagaatgaaagctttaactggcaaccaaatgctgacttggttaaggttatgcctggcaagaaatatacagttgaagttactgccaaagttaaagacaatgcagacttacaaaagtatattaaaaacaataccatcgaaattcccaatacggctcactttaaggcgaatggtaaagacaccccatcaaatactccagttgtgaccccaaaggtagaagaacctaagacacataagggaattgttaagaatcctgcagattggacgaaattctttggcaataagtctgaaacttcctcaggacaagactctgatggtgatggtgcattacctaaggcttatcagaaagcgcaagaatatgtaaaggttgaccctaatactggcatttggagcaaggctaatgataaggttactgatgaacagtatgcagaagctgttaaaatcttacaaaagccgttctcaaaccctaatgcaggtaaagaagcaactagttcagatgtagcaactaaagctccaactagtaaagaggacttgaagcaaatcattagtgcttcaactgttgataataaccaagcttcacgtggtgatgctgtagattatctgttgacgtttgatattggtaattctcaaaatatgaaatcacttgtattaagtgatgatttggagaatgtgcttgacttaaagaatgtcgtcatcattgatagtgatggtaataatgtaactaacgaaggtaagttagttacttcagatgaggatgaaagctttacttggactgctaatgatccagctaagttctcacgtaagaaactatatgttgcaattgcttctaacattaaaccgaatgcagatgtatcaagttatgacaatagcggtattcctaacactggtcatatgcaaattaacggtcaagataccccaactaatgttgttcatactacgcttaatggtgatccaaagaaccctgaagatcctaagaaggataagcctaacgatccttctaagccagatggcaagaccccagacccatatggtaacttagtaaccaagcaagttaaagctgagtcgggtcaatggggtgaatcagataaggttcaagaagacaaggactttgattacaaggttgaatacactgttggtgataagcaagacgttaagtcagttgaattcagtgatgacttggaagatgtccttgatcttgaaaaggtaacaattactgatgctgatggtaatgacgtaactagccaaggtgaacttacgcttgataagaatactgaaaagttctcatggaagcctaaggctgatttagtaggcaagatgggcggtaagaaatttacagctaacatcactgctaagttaaagaaggattctaaggttaatggtgaagtaccaaacactgctgatatgacagtaaatggcaaagacgttaagtctaatacagttaatgtcattccaccacaagcagataagaagtcgccaagcaatgtagataatccaaagaatccaaccacgaactctacaaataatccagaaaatccaaataaccctaacaatccagcaagcccaagcaataatccaattactggtaaaaatggcttcttgccaagaacaggtcactttatcttgcaacatgcaggctggattattgcaagtttagttgcaatggctggtggaattggcacttatttgtataagtctaatgatgaatttaagaataagattaaagggttaattactaaaattactaagtaattagctgctgcttttgacataaaaacggtatataatatgggtagaaaaaagaaaataaattttccacgtattatatattggaggatactagaaatgaagaaaagattattggttagcttaagtgcagcagctgttttatctgttagctctgtggcattagtgaataataatgttgaaaataccccaaccgttgtacaagcagcgacctataaaaagaagttgacaaagaatgcttatatttataatgcaaagggtaaacgtgttggtaagaaagtattaaagaaaggcaaacttgtaaaaatccttggtaggaaaacgattaagggcaagaaatattacaagattggcaagaacaaatatgttcgtactgctaatttcgtagtaaagtttgcttctactaatacaagttcaacttcaagttataatactgggtcatcgagcactactaataatggatttacaaaatccagtactaagggagaatttccaacaagtaatagtgtacatgcaaaaacaagtacatcatcaactacttcaaaaacaggttcttcatccagtactgcttcatcgaagtcatctggagtaaatactaatgattctgaatatgttggtgatccaaataaatcaaacattgtaggcgataatagtagtttattaagtactagatggcggtcaacattctatggaccaatgacggctaaggaagatgctaacagaaagaaatatggttataagcatgtttactttagtgataacgaattacagcgtctagaaaagcgtttatggcaagacattcaaaagtaccgtgaatcaaagggctatacagcttttaaaactaatgcagaactaactaacctagctcaacaagctcaagttcctggtactgcggcttataacaggtttagttttaaaattagtcagaatactaatgatattaaaacctttttgcctaatttagctgctaagggtttgaatcaagctattggatatgttgatccaactgcatatggtgaaaatcataaagctttactaatgggtggagatattacacataatggacgaactccagaacaagctgctgatgcaatctttaaggtattaaaagagtcagatgatttccaatccaaaatgatttatggttggaaagaatataaagcttatggtgcattaagtgtacattattactacgataaacaagcaatcgatggaagcgcagtaggaatttcattcttcacggttgatggtacaagtcctgaatggattagtgcttggaataatgctaactaaataatctaatttaataattaagtctaaagaagagtataaaaaagtggctcttctttttttgttactcaaaagaaaggaaattatatgatttctctaacaaagaaaaataaagtagtcagctttgctgcaattgcattgatggcaacgagctttgggctgggcacatgtctagctactggatcagatactgtacatgctgataacgccgaaatggtcaatttgcctaaaggacaaaatgctgttggaaccaaaatggcaggaacatatgcttttattcctagaattactcagggtgtaaccaaaatccatgcctttggtggtgcttcacaagattgggctacttctagtacaaatactgaagggtctcatcactcttggtacgcattttccgttaggggaaatgaaaaattagctggtaaaattggggtttattactcaaatgttggtattgaccctaatagtgggaaaactattgatgttaaaatcaccgcaacagattggaatattcagtcatataaatggcaagatacatctgatggaaaacgtgaaaaagtacctctaaaaaatccaacaattgcctttggagtagataattttgaaatttttactcctggtcaaggagctgttgcttatcggatagattttattgatcatgacactggtaagccgttaaaattaaacctaaaccaaactgttcgtgatattgacggtaatcaatgggtaggatatgatagctctacctacggcaaaattgatcaggttatttggggagatggacaaaatgatggaaatacttggttaagctataaaagaacattagggaataattacatcttttcagatgcaaatcaacaccataccgctttacctgatggttcaggtactgtaagatcctcagattggaaggctgcatatacagcaacaatgtcaaacacaaaccatattaatatgtattgggtttttggtactacaacaggaaaacatgcagctgaaaaccaaacagaaattgaagcagatactgataattggcaattgaaccaaggtaaatatgatcctgatgctggaatgactgataaggataaggtttctatttcaaatagtatctggaatggtacgtttaaccatgcttatctaaatatgttcgataaacctatcgtaagagataagccaatgaatcctaataagtatgtctcagataaggatgagggaactaatactccagatgaagttggtggtattaagtcagtaacacatgatatgcttgataatcgttatgaacaatatcactatcaaattacacactctgtaccatacgttgaaaagcgtttgaaatatacagaatatagaatcaccgataatttagataatattctgaatattgatacaagctcaattagagtttataaccgtgcaaatcaagatgttacttacaatttcacagtaactttatcttcaggtaataacttatcagtaattgctaaatctgatgctttagcaatggatgatttctataatgaaacttacaagattacctttgatgcaactgtaaagcgcggtgaaagcttaaaggatcacgcagatccaaaacataaagatcaagctgtaatttacaacgaagctaaagtaattcaagataatggtagtgcagattctaaccaagtaactactaatattccatttactaatccaaaggatgaaaagtttgtttcagaagatggattaggtgattctaagtcacttaaagatgtagactttggcaagaaatatacttaccgcgtagaagctactgtaccagataatgtcaatgttgattctcttgcaattaaggatgctatcaaagcagacgttcaaaacattaagagcgttaaggtttatgactatgacgacaaagatagtgctggtaacgcaaaagaaattactgatcaaggtaaattagacgttaataataagactggtaagatttcgtgggtagcaaccgagcctggtaaatggcatggtaagcacttgaagatgttcattgatactactttaatcaatactcctaaattgcttgactacctgaacaaggataatggacaaattgaagtaccaaatcaagcacacttcttgttcaacaatgaagacttaccaagtaatatcactcatgtatctccaaagactccaaaagcttctgcagaaaagaagattgaggtaaatggtgactacactagtgaggatacagatccaacaggtgatggtaacaagaaccaaaatactgataaggataactcacgtgaaactgaagatttaccaaatcatgattaattagtaaatcttaaaggattagatgaaatggtgagaaagtctaatccttctttttctttcgggtgagatggtgggcaatagttaaggaggaaaaatggttcttagcaaacaagacaagtccattttacgcaagctacataattcccaaggcttaacacaaaaggcttgggaagaaaaaattatggttgagtttgtaaaagatttgatttcaggtaataaaagtgaatataaagatgcagttttagaagttgcaggtaaaaaagaattatctgagcagctggagaaactacagattgctgaacctgataagactttaaatgataaggttacgtcatcaaaagatgataataagcctacaagtgattttaatgggacaagtaaaagtatttagtttagctaactaaatgctttttttatacaaggaggattaacaatgtttttagctgtttataccaaattgacctacttattttggagcggcttaatcggtactcaggcttttttaaacgaacatccagttttacttaatgtttggagcaatattaataaggctactggtagtaccgaaaagaacctgaagagtatcgccaaaggtctgttcattgttgttattatcttggctggtattcttttcgcttttggtaacagaatgtcgcaaaatgcaaagcaattattgatgtatgcactggtaggtgttgccattgttgctttagctgcaagtttagtaccatcattcgcaaatatgtttggttggaatgctagatagttagttttgtaagtaaggtgaagtaagtttaacttactgggttgatggtgggcgttaaagaaggagagaagattatgctattagttacctttgataaggtaccaaaaggggcgaaaaaatattttcaatttaagcataaattaagtagaaaatcgcctgagttagacattaaaactgcagatgatgcagttaaggactatgcaaagaccttagaagaagctgattctaatgttacatttactatctttgatgatgaagatgaagatcgtgaagagagcagctttgaagcacaaattttacctgaggatcaagacgggggtattttaaacttgattgatcgtgatttagagaatgaaaatttaactcgtgatcaagaagaaacagtaacaacgctaaaggatcaaatctttaatgaacttgaacctagtttgaatgatgatgaagatgacttaaatgaagacaatgggttcatgtttaatagtaatcaaattctagattcagatgatgaagtgcgtgatgaaatacctcctgaaaatgatgtaaatgatgagactgaggataacagtccaacagaagaatcaaatagtaatgccacagccaatcctagtttgaataatgttcctacacaattacctgaaaaggttggtgcttcaccaattcaagcaggtcaaacaactgaaacagaaactagtcgcagtgaagtaattagctatggcaaatataccgatgccaatgatattcttgaccgtttgccaagaggatatgataaaaatcaatttgctctaaataatattcgtcatgatttaggctatttggataatcctaaagatcaatatgatcaagcgttgaatgataaaatcgatcaggcgttaagagattattcaatgcaagatattcaacgtgtatatgatgaaggtttagcgaaatcaaaggctgcaattgtagatagattaaaggaagcatataacagagttactaaagagtcactagataaaattgttgaaggcagaacagcggcacagattcaacagctagtagttaaagcaactcaacagaagcaaaataatcagtctgacttgagcaagttaaaagaaaataagacattagaattgaaaactaatgatgaagcagcattagctgagtataagaagcaattagaggagaaacgaaatttagctctaaaaaattttaatgatcaagaagaacttaaaactcgtaatgctaatgaacaaattgatgagcaattaaaggctgataaagctaaagtagagcgtgttgcgcgtgatgaagaagtacaaaaacgaaattctgagttagatgatagtagaacaaccattagtaatgattttgatcatgcagttagaaataactatgacaagaataatgatttatttgaagacaatttaaagaaggttcaagaaaaagttcaattagctaaagaacaaataaatcaacaaaagcaacttgatcaagaaaaggctgaggaaaagcgtcagcgagaagcagaagctgctcgcaaagaacgtgaacttgatttaaagcaaaaagcaattgagcagaatgagtctttagcaaaattgcaacaagaaaatatggcaaagttgcctgaggaatttgcgaaagcaattgctgcagcaattactcaaaataatttagaaaatcctaacgtaaaaattactttaaataatgatggaaagaatgctttagtgcctgtgccacatgttgatggtgaaatagtagacttagatgatactaagaaaaatgatgcaccaattgattctgaatcaaatgaagaagattcagagttaaagccagaaaccgaggataacagtcctaagaaacgtcactataaatctgaaattatctcattagtttgccttgcagctgcggctttgggtggtacctgggcttatactaataaccattctaataatgaacaaaaagcttcaattgaacgatcaagttcaaactcgcatgtcaagaaaaacaagcaatcaagtagtaagcaatctgataaaaaatcagctaatgaagatattgctaaaaataaaaaacctaatgctaaatcaaagactaaatctactccaacttatttaactaggtcacaagctattttaaaacaatatcgtgaaactaagacttgggcacaaaagagagatatgctagatggtttattagggcaaggtgacgcaagaaatttaaagaagattgctacaatatattcaaatccaattgctagtttgtacagtgccattgctaatgaagacaaagctcagacaagggatatttggctaagtttaactgatgatcagcgaacagaaatttccaactcagctaaaaaagctgtcgcattggctttctatgatattgctgattggcaagatgggtggttagctagatatgcgtactaaaaagagaagatcacgaataaatctaaaaaatgctagaaacaaggaaaagaatcttgtaaaaaaaggcttgtatcaagttgaaagacaattacatcgtcccaaaaatgaaaacaagcagtctagcaatattaattttaattatacgaagctgataacaacgttggttataggaatttttatctttctagtaataatgtggttattaggagcattccataatgtcatgttacaaattaaaagtaaaaactataacttattcacgaatggtctcgatttagataaagcgggattagctggcttgaatttctttaagacacagttgaagcccatggaaattttagaggtatttgctgctagcgtaattattggtggattgttaagtcaaaaatttcactttgaaagtcaaaaagtcgctcatgggcaaaagggaaatgcccgttttactacggttaaggaattagaagacacctatgtaaaagtgcctgatcatagtcaaccagggttagatcctaaaaagcctagctttaaaggttttggtgggtttcccattgctcacattaatagattaggattaacccaaaaatttccatttattactaaacatggctattatttcattgatacaagtacagttcataatttgattgttggtacttcacggtctggtaaaggtgaaactactatattagaacaaatcgacctagtaagtagggctgaaaaacaatcgtcactagtcgtgaatgatcctaaaggagaactgtatgttgcttctgtaaatacgttgaggaagcgtggctatgatgtttatgaattaaatttagatgacccaaacaaaggaatcgcatttaatccgctacagttaatcattagaagctgggagcagggtgatgttgaaggagcaatgcaattagttaactcaattacctactcgctttattttgataaacaagcaggtcaaaacaagtgggttaatgacgacgcacaatcagctgttaatggtatgattattgctttgattgagtattgcatgaatcctaaaaactttagagataaaaaagcctatccagaatatattacttttgtaaatatcgctgatttagttaatcagttaggacagatagattatactaatccatcagatccatatactcaacacaacgttttaagtgaatactttaagcatttggaacagggatctattgctaaaaaagaatttggttcaacaaacttctcaggtgataaggcaagaggctcaattttttcaactgttgtacagaaactagatattttcactttaccgaaaaactcacgcatgaccagtatgaacacactagaaatgaaatcaattggttttccaaaatatttggagtttcagttgcttgatcaacgactatatggtgagttaattaaaatcaattttagagataatcataataaaaaactgaaaacaaatgaaattcgtattagtcaacaaggtttcgttgaaaataacttcgatgtcaatcttaaaacaggtagttctgtagaaattgaagctactgtaggacatcaacgtttgaagaatacttttaagttgaaaattaatcctaatgttaaaaaagttgaagtaagtcaggtaggaaaacctgaaattaaaatggaaaactttaagatgcactatagtgataagccaattgcagtctttatgaaaattccagattcagatgcttcaaacaacttgctagctacaatttttgttaatcaattatatacagaattatcacgtcagtgtcggctggttcaaggtggaaagacaattagacgagtacaatgtatttttgatgagtttggtagtatgattccgctgcagaatatggatcagattatgacagtttcagcaggtcgtaatattctatttactttagttatccagtcttatgcccagctctacagtaagtatggcaaagaagacggacaagttattaaagaaaattgtcagaataaatgtttgattatgtctactgattcagctactaacaaagaattttcagaagcttgtggcaataaaacgattgagacaagcaatatttctaaagatcaaaatggtttagccaaaaatgttagtgttagcgtagataaagtgccgttgatactaccagaacgattagaacatttagctggcggtgaaagactagttttgagacctttaacaagaatgaataaatggggctgggcggtagtttcacatcctatttttaacacaggaaaaacattaatgccgtttgcacatacattcttaactgatgactttaatcctaaaactaatccagatttagttgaaaagattgatgcacatgccaatattaatttaaaagcattagaaatcgattggagcaaatggttaacttggactgaacaagttaccaaacaagatgaagatggaaatgtatttgtagaagaagaaaatttggctttgcaggcatataaccaatatcgtcaaagtgacgcaaatgttcaagcagctgctaaagatgctaaggaagaacaagaaatgaagaagtctttaaaggaagaagaaaatcagattccaccatttatcacgaactggttaacggaacatgatggtgatattagtgatggaacaaaacaagcaatattgaacgaggctacaaaattaaaagatgtgcctgaaggacaaaaaccaagttcaatagcttttgttaatatcatctataaagataaaaaattagaagataagaacaaggaaaagaatgagttaacacaggaatttagccaaagctttaatgaatattatcaagataagtagcgataatgactacttatctttttgtttaaagaaaggaaaaattaatgacaaattggttattctatttaactagtttcattaatcctgagtatcttgatatttttagtagtttggtagattggtggcaaaaatcaaccaattcaggtgattatgatccagccaaattacaaaaagtaactgaagctctacaaaatgcggcaccttatttacattatgatgattttttgggacgtattttgaatcagacaaaatggggtatagttaagatcttttatggatttgccaattgggcaagtgaactagcaacagatagtttggatttctcaggaatcttaaaatccacaggtttaaacactaatttaattaatggggtaatgggaattgctgcagggttgatgattttaaccttaacttgggtcggaattaaaattggtacctcaagtaaagctcctcaattaaaaaatgtcgtttggcaattagcaatttcagcgttcttaatcggaaatattcagccaattacaaattgggtggttgatcagtctacaggtgtatataaaggctttgtacaggctgataatgataaagggacgtcaagcttgccatatcaggtagtacaagccaattctaatgacctattagcaatcatagctaataattttagtggcttcaaaatcaataatggggatactaataccaaatgggaaggtgtttctaaagataaaaatggtgaaattaaagaccagagacaaaaagatgttcactatggttcatttgctatgaacaagtctgattttgatactgcaacatcaggcgatttatcaactactatttcagctgatttagctgagaaattaagtaataaagcaaataagtctaaggaaaaaccagcatgggaccctgacaatttgcgttataaattagctcctacaggcgttggtacgaaatcaaatgtaaagggaaaagcatattcaggatattatgcaaccaaagtaagtcaaagcaatactgcctttttcaaaatttttaacggtgggtatgaacgatattcagtacaattcttcccagttgtagttgccttattttcaatgacagttgccttcttactagtttgctttgtttcagtaagagcattcttggaattggcaattatgcaagtattatcaatcattattttctccactgatttggaaactggaaagcgtactaaagctgcggtacaagatatttttagttcagcgttgttaattgcattccaaggctttgaattagcgttctatagaattgtagctgtgtggatgagttcatcagatgcaggaaagattcatgataatccttatctatatgcagttggaatgattgctttaacttgggcactttgggaaggttcaagcaaggttcaaaaattctttggtttggatactggacttaagcaaggctggagtaaagttgctggaggaattgcagcaactgaatatattgctggtaaaggtaaaaatttagctgaaggcgctgttggagttgccagaggttctggtaagttagcaggggcagcgattggtgaagctcaagcttggcaagctggtagctctactaaggctattgctaaagaaaatggagcaagcaatagtgaagcaaaacaagctggcagttatgcaagaagagcctttcgttcagctcataacgactttaagcagaatggtggcagtgcagttgattggaacagggcagtaaattctggtgctgtatctgaaactgtacaagatgaagccgctagaatgatgagaaatggtggtttaactgataatcagtacaacactttacatcataatccatacatgcaaaacagagctgaaaagaatggtggcagtgcagaaccaacaggtattggacgtgatacttcatttgtaggaaatccaaactatgatggcaagaaagaaacagtggcaacaagcaatgttgattcagctaaaaatgtaaatgaccaaggtaagaatacatcagttaaacctgataatattcaaaaccaaggcattaagaccgatgatagcaagcctaaatcaaatgctgctaaggaaagttcaactgacggctctattaagtcaacaggtggagctaagacaactggtaatgatgcaaaaattccaaataccacagttggtgaagcaacgaatggttcaaagactggtaaaaaagaaacagcaaatgatcctagaactaacagtgcttcagttactggttcaggttcaaagcgtggtgaagcaaatagctcttcaagctcaccaacaagtagtaatgcggtcgatgaattaccaagcttgagagatactcaaaaatccactagtaagttagcaagtcaacaccgttcaaatcaacaaaccacaccgccaaaaccagttggtgaaggcggtagacacttaagcaatgtttcagactttaagggacaagacagtcatagtaaagtaactgaaactgctggtaccaaccatgtagatattgaaagaaaggctggcagaactgaagtatctactcatgatgtaggcaatcaaggaatgagtagtgtgaaggatgctatgaagagcagcgtaccttcaaacactaatagaaccgttgaaactcaaggcaatactaacacggtgactgaaattaagcatgataagaccacaatcaatcagcaagttgaaaactctactgaaactaaatcaccaagttctaccaacattggcaaattaggtcatggagatagcagaagaaaggattagtgcatggataaatatcaaaaaataatgattcctaagtcaactaatgtatctatccaaatctttttcctagatatgtttgatgtttttgctcttttcattgggggtatggcaggacaacaaatttcttttctatttaatttacaaccgacttggcaattagtaatgacaggttttggagttgtagtaggaattctgctagtaatgcgaacccctctagcgccaaagattagaaattatcgtgttttgttaagcattatgcgacaagaccaaagcagatattatccattatttttagaaggagaaaataatgcgaacaaaaagaaaaagtagaaacagtaggagcaaagctcctagcttgtttagagcttttggcttagataaaggatcaagacaagatgcaagagatcaatcaatagttgaatacttgggctatagtaactgctcaaaagacgggatacttgatttagtagatggcacccaagcacgctatttgcgtgtacattcgacagatttatattcacttgatgatgaaaccagaagtaaatacctagattcatttactacatttaatcggatttatagcaacgattataaaattgtagtcatgtcgacgagaattgatactagtgaacaacaacagtattttcgccatttaaagaatgggattcgttcacccaaaaccagatatgaaaaaatgcgtttacgattagttaatgaaatgttgttgcaatcagtaatgctgtcaagaaatacagaagattactctgatgtgcagttttacattatgatttttggagaagatttgcacgatattagagttaacactagaaccgctcaatttgctgatcaagggttaatgggcttgagaccattggactatgaagaaacggttaaagtactctttagagaaaacaacttgaatagtaagtaagggagaaaaaatgagaatttctagtttattgaaaacaaagagacacaagaagaaaaaggtaactgtaaagctaaatccaagacaagttaccagcttgaaaaagcaaagagaattactaaaaaatggttacaatactaagtttctagcagaagtacaaccgcagggcggtattacttttgcggataattatgcaattgcaagtgatggatatgctgcttgcttatctgtaatccattatcctaatgatccgcttttgctctggcttactcaagtgtcattaaatgattcaacattaactacaattgacgttaaaactgattcgggctatgaaattaagcggcaattgaatagatcaattgaagaattagctgaccggcaagttaatgctagaaaagccactgatgctttaaatgcacaaaaagatatgcaatcactagaaaaatatgcattggaattaagtcaaggtggcgaaattcctaaattaatgctaactagaatctttgtatatgctccaacgattgaagcattagatcaatcagtttctaatcttcgtggcaagcttcgaggcgagggttataacgttgctgtttatatgtttatgcaagataaacagtttaaatcaatggcattaccaatcacagagcaagaaaaggatttagcagcattgccagaacaaccaattccagccttaacggttggagctggtgacccattttcagctcaaagcttaaaggaccctagaggagtctggttaggtcgtacttcaactgggggagccttttattttgatcaatttagatcaactaatatcagaagatcgtttaatatgatgatcttgggtaagatgggtgctggtaaatcaactttaatgaagatgttggttgaaggtacaattgctagaaatatgtactttcgtggaattgataagactaaggaatatattcctttaattaagcattatggtggaaccgtggttagcttggatggatcagaaggtatgattaatccacttgaagtaatggcaactactgtagatgaaaatacaggtaaggttgatgagctagcaagtttttaccaacatatttctaaggtagatattctgttccaaatgattaataagggatcatttgagaatattgaaatgcaagaatttgattccttacttcgtggattttatgtagacatgggacttctacctagaaatttccaacaaaacaaaatgaatatcaaaattactaacttggatagcaaaaaatatccaactttcagtcaatttttgaactggctgaaaaagttagctacaccaacgtattatcaagaacatcaatttacgagagaaagaattagaacttatgaaaaaatcaaagttgctttggaatctatgattgagaactatggtcaattgttcgatggatattccactatgagagatttaactgataccaaactcttattatttgattcttcagctatttcaacgatgaatcaaaatgtttatcaggcacaactatatatggctctgagtttgatctggagtcatgcattgataaatggtagaagacaaaatgctctattaaaagcggggaaaattactcgtcaagatgttcagtattttgatgtatttttagatgaatgccacaacatcattaattatgaaaatatttttgcggttgattatgttaaaaactttgaacgagaaatgagaaagtttaatgcaggaattatctttgcgacacaatcaccggaagaaatggtccctgattctgtagaatctgctcaattgtcaagtttgaaagttgtatttgaactgtgtcaatacaaatggctaatgagtatggacccatctcaacttaagaaaatcaaaagtttattaggtgaagcattaaatagttcagattatagtaatatccctgacttgcagacaggacaagcaattgtcacgatgggagggagagaaagataccaagtcaagatgaaaccatctgaacgacaacttgaaatttttgcaggtggtcaataatgataacaaatcttaagcggttaaaacagactaaaaaatgggctggattagccgcttttttattaggaattttagccgtattatccgcagtatactttgtcgtacttttaatagcagcaatgggtgctgcttcggatgatgattgtgatacaaatggagaccaaggaggagtagtagaaggccgtattagcgtcattgaatcacctaagtatggtcaaactgctatgatgcatattgcagatgccgtacatgaaaaaactgggattagtgctagattactgtttgctcaaatgggacaagaaacaggtaatggtgatagttcagttgctaaacatgatcataattttggtggtatgacttattcagaaggaagcactatcggtaccaaaggtgaaagccgtggtagtgaaggtggtaattacgttcactacaagaacttaagtgattttgcgaccgagtgggctgtgacggttcagaatggttttaaaaaagctggattaggaaaagatgcaacagttgcggaatacgcacatgcaatgaaaaaagcaggatattatactgcagctgaaagcgaatatagagcaggtatggaagctcaagctaaaaaatatgatgccttgaaaggcaataaatcactagctaaaggtgatgggtctagtggctcagataattcagctgaggaagattgtaagccaataagcggcaaatgggggtggccattcaagtcaattcctaaaaaaggaccaggtaatacaatctcaggtgagcaattatttggtaagtcatctacaagaacaggtggctttcatgatggtgttgactttggtactgttccatatggtggacaagatattttggcaattcatggtggaaccgttaagaaaattgcatttcaaggacatactcaagatagtctaggaatgtacgtttgggtagaaggctccgacggttggaatgtcatttatcaggaattcggctttgatgaagcagatttgaaatacgtcaaggtagaggtaggcgacaaagtttcagtaggagataaaataggtcacttagcaagtaatgcacatggtattactcacgttcacattggtgcaactaaaaaagattttgctaccgcagagctctctgcgtacaaagatgatggtacttggaaagacccaattaaattaattaaagatggtttgaacaatgatgcagaatctgaagaagatgatggcttatcaaaaactgaatctgaggctcgtgattggatagttcaacgagaatctggaggtagatgggacgctaccaatccaactaatccaagtgtttatggtcgctatcagttaaaacgtgaataccttaaaggagattatagtcataagaatcaaacaagagcggcaaataaatatgtcaaagacagatatggttcgtggcgtaatgcacaaaagttctggaaagaacacaactggtattaatactaagaaagaaggataaaatgaagcagcgtataaaggagcgcgagtctaatttaaaagtttggacaatgacagctacggctgctgtaattgttttgggaatattcgctttaagtagaattccaaaaaatgacgaattaaatgaaattagatccgaaatacaaacagtcaataagcagatagatcaagaaagagatagtcaaataaaaaattctgcctataaacaaaagtttgacgtagttggcgcagaaaaagaagctcaagctagatttttaaaagttatacctaacatttacactaagagaaaattgtcaaatcaagcaaaggaatttgatgcttggaaaaaaatcttaccaggtcgggcaggagagaaatttattaggtattatggtgattccatgggctacttaaaaaataaaagtacaatgatttattttggcaatttaacaaatgtaaatcatacaaaggtaacggtaattgacgtagccataagcaaaaacaaaaaagaaattactaatggttgggaatttgactataacttgaggactcaaaagataaatagcttcaaggaaatttcaatagaagggaattaacaatgaagaaaaaatatcttttaggtggtgcagttcttggaatcatacttgaactcggagtaattggatatgaaaccaatgaacagcaggctattgattatcgtgttgatcaagcaagggctgaactatccaaaaagcaaacggaattaaagaatcttgactcaaatattgcaaactcacaaagaaaaacagctttgaaacaaggagggaaccaagaacaattagccgagcaagaagtcgcccaagcaaaagcaaaaaagcaagtacgcaaactttttaaattactttatacatatgatagtggtgatgaaaaactaaagattccagataagattaagaaaacaaatcttgtagacgagcatattttgaaaacaaattcaatgtttcagaataataagcaattggaattgcagtacagtggcgtagatatgactggtcaaattgatgaacttgatttaaaagcagggattttggaaagtaataaaattcctgtatatgtcaaagtttatttcgagatgacaaaagagggtagaactttgggaacgccaaccgatggttatgaattaatttatgatgctaaggcagagcaaattacttctatcgaatacttagggcgttatcaagttgatcgagaggctgactaaaaatgcaattaaaaaaattaaatagaacaaaaatcattgcaacagttttagcaatgatttttttatttgttggtggagtgtttgctttcaaccagcatgtaagtcatgtcttaaaccaaaaagatattgtaaaaatcaaaaccaataatgaatcaacagtcttgttttatcgagatgattgtggaagttgtcgatctattttttattacacagttatgaaaagagatttattaagaaaaaatattcaacttgtaaatactaatcaacctaagaatcgacattatatttctgaatacaaattaactaaagttcctaccttcatacatttgaagtatgggaaaattgcagaacgatattcaggaacaaacattgaaaagatagatcaggtgataaaaggagattaaaaatgtctagccgagttgtatatcaatcagaaaaaacaaagttgaaaaagtcaaatcatcgtttgaaattaattgcattggcgttgtttttattatcggcggcgcaattaatggcgacagtttactttaatcgtgataatccagattcagaaagtcaaagacaaattcgagatcaacaggagcagattactgaattaaaacaggaattaaatgatagcaaaaactatcgtgtacattcggatgacaattagaaaggcaaaaaatgattcaaagcaaaaacaaaaatgaattgaagcgacaccaaaaacataagtatcgcaaaatttatttatcattcattggagtggtggctgcaatttttattgcaatcgttgctagtccctattggacaggaaaatcaattgacactgagcaaactgttaatgtagtgacaggcaattcatcattttacctagcaaattctatttacaataagcaaagcggaaagatgttgctagagtattatcttggggactctacagacgtaacatctactagtgacgattcagacttaagcaacttaaagtatgctacaagagtagtaaacatgtcacgtggcggagaagatggagaagagcttgcgatcaaatcacagaaaatcaataatcactttttagtaattgaggttagcggaatcaaaaatggctttggagatttaaagattgatattctgccacaaaaagttaataagcgagttaacatgcaagatttctctgaaaataattatattgagttcttcattaaagagaataaggttgatctgacttcaagcaaagtaactaagagctatcaaaactatatccttgattatcgtcaatatctgattaattggaataaaaagaagattagtcaagaacaaaatacaattaaggatgctcaagctacgattcaaaattctcaaaataatttagattctgcaaaggcaaagttagaaaaagttggtgatagtcaaaaagaaaattaccaaacacaaattagtagtttggaaaatgatatttcagaaaacaaagcagctatcacacaaagtcagcaagcaatttctaaatatgaagacacaatcagagacattaaggacggtgattttgataattaggtgcaaaatttagctaaaaaatgttacgtcttggacgtaatgagctacgtaagaatacgtcctgttcggatatcactaaaaaacattacgtatcaagacgtaatgtcaggtaaaagacgaacaatttagaagtatacagacgtcaaattaatcagaagtgatatcacttctaaaaatgcgaaatcgcttggtacaaccaagcccagcacaccttgataaaaggcgtggggtcagatttcccttatgctctttactagagataactaaaagaagcagattttagtcaaatttcagagtagaaactagaaggaaaactagaaactagaaatcagaggaaagaaaaattatggtaaaagttttaatccgtggaatcagcgaacaaaacttggctagaattgatcggattgttaatcaattaaatcaaaattcaagtaagaaaatttccagaaatcaatttttgagagaacaaattgaacaaattccaattaattttcaaaatcaaaatgaagattcgcaaactagtttattgattcagaagcagaataaacttctgcaggaaaatttattagggctgaatgttcttgcaaagtatttcattagtggagatgttaatgacaccgaacgagcattaaatttgttagatagtttgtcagaagacacggcaaaagaagatgattaaatttagaaagagggcaagaaatgggacgacagcactttttgcaatttcgactcaacgataagcaatggaaagaaattaggcagattagaaaagaacattgctttgataataatggtcaactttataagttcttattcttcaatgccatgttaggtgttcaaaaagaaaaagaactggaagagttacaaaaaattaatcaaaagattgataatgctttgaaaaaaagacaagaaacttacgctgattaagaggaccagaaaaaatgattaagacaacttttagagcgacaatttctgatacagatttagattggattcaagattataaagaggaacacgatttaaaaaataatgctgaagtaattcatcatcttatgaagttagcagaagaaaatgaaaaaaattctaagtggacaaaagatttaagtgatattagaaaacaacagcgatttaccaaagaacaagttgcaattctaacagaaatggtaagtgagtttttgatgactcaaggaatgcaaattgtcggaaatggaattgatgcagaagtttataaatctgcaaagagaaaagtaaaagaaagaattaataatagaatggaggaaaatggcggacaacttgagtaagttttgatgctgagattgcgattctacggcttttaaaattgaaagagcaaaataattaatcaacttgcttcatagaatttttatttgtaggaggtaatttttgggacgaccagctataattttaacttcaaaattttctgtgccgagttcacgaaaagcttttggacgttacgttggatatatagccagaaaagaagcattagaagaaaaagaatttttaactgcagaagaaaaagatgaattaagtcgagttaaaaaacaagtaagaaaattaaatcaggaaaacaactttactagagtaaaaagtgaagaacattctgaacgagaagcagctgctgaaaagttaatggaaaagagaaatttttttgatttgaatgataaggaatttgataagtatcttgggtatatggtacgaattgatgcattaaatcagaaaaagaacgaaacgggactaaataccaaagaacaaactgaattggaaagaatagggcaagctgcaagtaagctgagtgaaattcatccaaccaaagaaaaagttttagatggagtatttagctctgacaaagatattgttcagttgaaagatttagattatattcgtgagcaattaaatgaaggacaagagaataattctgtcttgtggcaagatgttgttagttttgataataattttttaaaaaagaaggggattttatctagtacaactggaatattaaatgaggaagaactacaaaaggcaactaaaaaaatgcagagtatttttcaaaaggaaatggatccaccattaaatgagatgtactgggtggcttccattcatagaaatactgataatgttcatattcacattgcaacagttgagaaagacccaagaagaaaaattataaaccgtgaagggattagtcaacctaagggtaggcgaccacaaaaaataattgatcatatgaaaagtggttttgcaaatgaactgattggttcttcagagatgactaaagaattatctcagagacgtcaagctattagagaagcaattcaggttaatttgactagtcaagttgaacagccaacttttcaagcagagataaatcaatttgttagagcattgcctgagtcaagaagagaatggttttacaacaagttagataaaaatcaaaaaaagatgtcggatcatttggttgatgaattgctaaaatataactccgattttcaaaaatataaagacttagtttggaaaatgcaagatgaccgacaagacttatatggtaaaagtaaacgtgaaaataagaattatgcaattaaccaactatatggcaaagaaggaatttatgcaagaaatggtaacgcattgctagctgatttaagaaaaattgataagcaagctaaccataatcaaagacataggattaattttaaagataaagttgatccaaacgaatatattcaatccgcattgaaagaaattcgtaaggatacaacaatacaaaataataagataaaatcaaatgacgactatacacttcattcacatattattaagcgtagaaaaaatctaaaaggacatatttacttaaaaaagccttttatcagtcaaagtcaaatacgaaaaattaaatctaaccaagaaaaagtatttgaaaagacaaatgcagatattgaaaccaagaagaacttacgtgaatttgagaaattgcaaaatgaagttgaacgagaattagaatagaatcatcttaatttgtgactatatagttagtcgggtataggtggggaaattagcaagtagttttactacttgcttttttgacgttaaagaataggagaaaaaataaatgcttacttttacaaaggaacaaattaaggcagctaattcagcgagtattgttgaatatgcaaggagtgcaggaattgatttacgtcaaacaggcagcgatgaatttaaaggggtagaacatgattcattggtaattacaccatccaaaaattctttttactggaattcaagacaagttcatggaaaaggtgcattaagcttttctacattgtatgaattgtcaggtagcaatttaaatgaaaaagagaaattcctaaaggcaatggataaggtgttaactagtggagtaggtgatggcaaagtttatcaaattaaaaaagaacctttcaagtttgataaaaatcaaatagattcagaaaataaaattaatcgagtatggggatacttgcacaatcaacgtggaatttcgagtcaaactatagatcaattacatagagacaaagtgcttgcacaagataaattgggtaacgcactttttttgtggcttgatcctcaagatagacgacaagttaaaggagtatcaaaacaaggtacaaaaattaatcatcaaaaatatggtagaagaggaaccctcaaaatgattgaaaaaaattctaccaagggatatggtttttcattcgattcaccaggtatgaatggaaaaactccagaaaatattagattttttgaatcaccaattgatgcaattagtttctttgacttgtctaaggtaaaagtaaagggtggaatgaaaaatactaggtttgtttcaatggatggccttaaaaaagaagtgtttgactcgtatataacacaaacagcagcacaattacaaaaagaaggtcgaattcttaaaagtgtaggtttaggtgtagataatgatgaagctggaaaaagatttgttaaagatattcaatctaaatttcctaaagttaaatactgtaaacctagtgaaaaattaggtaaagattggaatgacaccttaaaagcttttcggaaaatgcaacaaggaaaacaaaaatctaagcatacaaccagaacattaccaggacaagaatttgaaaagcgatcggcttatttgagaagagaccaaggattagaaagataagcatatagaaaaagcagttagtcagtgactagctgctaatttaatgcaaaaaaagaagcacataccgctttccgtatgtgccgctctttaatgagtctcactgatctattcctcgccttctttaagctagcatatcgctaaggtagtaggcagccaagttgtaaatacaactctttaatttgcactgtgatctttacctacattgtaacatgaaaggataaattaatgaataatagacattctgactagcatatcgtcaaggcagtgggcaacatgatcaagtaatgatccttaatttctactgctattcttaaactttttttaacacatattcaataagaaaaagtgtaaaagaaaagtccctccaaacatcgaaggactttttgaaaagcaatgcactacgctctcttttgccatacgacaaggcagcgagccacctgaattgaaaattcaaaaccttaatttgaaaattgcttcttcaattaaatttattgtagtgtaaaggagaaaaaaagtgaagagattagaacaaactttgaataagcaggttaaatatatacctcatggatatcatattatgcgaagaagagatcaaagattagaaagataaataataagaaagagcagctaatcaaaaactaactgctaatttaatgtaaaaaagaagcacataccgcttgcgtatgtgccgctcaaaaaacaaggattattaattaaatagtgctaaaattgtaagtaatctaactaaacggaaagtaagtgagaacaaatgagtgaaaacctagaccttgcaaacttcatagtctcttttggtagtatgaatgactacagtagtactgtgttgcaaacaaaaagagccttagatcttaatgacctatctaagcttgtacatcaacaccacgatggtgccatcttaaaagatgctttagatggcatagctgcagcaaagaaattcggatttacaagacaaggaattattgaaattaataaagcctttacccatagcgaagaagaagacccaagtattccagggcgcttaagacatgcaagttataatccagacgacgcaattgtcattatcacagaccctaaaggcacagctaaaggtgcatactttgctccagaaaacgtctaccccgaagacttagatgaaataattgaacaatacaactcgtctaaacagactactaaagatgcgtggagagtatttgcaagcttatccaagcttcaaccattccaggacggaaataaaagaacagcgctaattgccgcaaactctgctcgagatacctgggaaaccagagattatttaacccttccttttgacaacatagaccacgctgaatttatgattagcctcatgagattttatcgtgcagatactagagaacaagaagacaaagctttggaccgaatgatagaaactttacctagcaagaacgaagttgcgtatcatttgagcaacgaaatttcgcaaaaagatattgacattaatgacctaaaaactaaaagaattaaatcattctaccaaaatcaagaattagataggtaacattaaagaatcgcaccaaggcttaaatagatggtataaaaaacgctgaaatcattgaattatcaaaacttcagcgttttttattctcagctaagacagtaaattatcttcagcagaaacgtgtaaatttaaaattactagaaagaaggtgatagtagtaaaaactaaataacttgtatgtagtcaggacacttcattatgaagcgtcttttttgttttcttagaaaggaaaaattatgtcaacacgatcaaatgtatcaattttaaatccaaatggttcagttactactcagtattttcatatggatggtggacttactttcacaggacaaaatttactagataattatcgtactttagacgatgccaaaaagttaattgaaacagggaactataacgataaccatattccagaaaatcctacagctgctactaaacttatggatgaatataattctaatggacaaagaatcgatgatcctgttagaaaacagtatcatgacttatctgcgatgattaacgatatatcaaagaatgacggtaagtaccttaattcagatgtagagtatcattatcttttttcaccaagcgctgaaggaaattatcaatggcacacgattaatcgaaatggtattaagcccctaactcaaaaagttattgatagtgaaaaagaaagtggaactttagccgatgtagattggaataaatctagttttacttctgattgggcagcaccattaactgataaagagatatcgagtcttaatgatgatatttcacatatggataaaaatgctttaaagtctgaaagacgacctagaaagacttttgaccgtaaagcttggaaaaagaaacatactcaaaccgttgaggatttaaaaaatggactacttaaagaagtagataattatactcaatcaccagagaaagttgtagaaatgcttgattttatggataagtttcataactattcctcaagaaatgcaatgatgattcagatgcagcgcccaggtgcgactgcggtgggatcatttgcaaagtttaaaagcatgggctataaggtcaacaaaggtgaaaaaggaattaaaatatttgttcctactaaagctacagttttctatcgtaaaaataaggatggcaacaaagaattagctaacttaaagactgccactaaagacgaaaaacaaaaaattgaggcgggtaatatagaaacttaccaaaaaactttttataagattggcactgtattcgatgctccacaaaccaatatgccaaaggaaaaatacccagaactttaccctaatagacaccaagattttaatatgaagaatccaggacagattgactccttagagaatggattaagaagtgtagctaatgacatgaaaatgccagtcattacttatgacccatttaatgcagatattcgggataaatataaggatccgcaaaatgctaagggatactttaacagggctactaacgaaattgtgttaaatggatacaacactccaacggagaatgtatcagtgcttgctcatgaattgggacatgcacagctacataatagccaaaaacaagaaaagggcctgcctagagaattaaaagagatgcaagcggagcttacaagttatctttattgttctcattatggaattgatgttaagcaagagacagttgattatatagctaattggacaagcaacggacaaaagtttaatgagttaccaagtggggtaaaagggcaaattttgacgcatgttggttcagctactaagacactaactaatagtaccgataagttactcgaaaaagaacaagaaaaattgggtcaaattgtcaaggaaaacttcttagatactcctgaacactcgcaatggtatgtgcaaaaagaaaaaatggagcaagaagttactgacaatgagactaatggaactaattttaagaccgaattgacggcactaagaaaaatcgaaaaaagtatgacaatagatacagttagaaatttggatgatgcatttaataaaacgcagtgctggacagcagatggcaactatagcaagttaaccgacaatttacaaaatgaaattgaaaaaaatcaagaaaagtctaaattgcttgatgataaagaagtgcaaactagcaagccacatgttgctacagtaaacagttcgctgaccaatgaaaaagcaaaagaaattgctattcaaaaaggtgaacaggaattggatcgttaaaaaatatcaaaaatgcaaaatttgatatgaggattgcaaagcagttagtaatttattgaacaagtggtgagtaaatttttctaaatattactcttatataggctgattccattgatttagtagtataatatcagtataaatgatatgaggggtgcactactatggcttcaattactaaaaagagaattcaagtacaaattgatgatggtgtggtagaagaaggcaatgctgttctaaaaaaattaggtttaacacctactattgctatcacaatgttctataagcgtcttattgctgagaatgggttaccattttcaaccaatttaactgaaagagagaaagatgaattagaaattcaaaacttaacaaaagattgggcaacagaagacctggatagccctgagaaactgcaagaatggatgtcaaaagatgagtaaaaatattgctacagcatatgttcgttttgttcaggtttcaggtggtaaaagacggccaattttcatattacaggaaactgaagataaggtctttttctttgatataacgacaaagtttaaaaataaatctgaagaaatcaaaaagcattattttgaaataaaagaatatgaaaacacaggtttaaaaaaacattcatggattgatacttatagacgttactcggtatctaaaaaagatactaatgttaaacatataggtagattaagcgatcaagacatacatagattagttaagtttcttcgtaaaaacgctaaaaaataattttatgttaaaacagccagctttaaagttattgtatttaaagctggctgtttttttgagaccgtaaaatagtttgtgtaaggatgaatgattccttaaatttatttctttaaacattagaaaaaggagttcctttctcgtatgattggtttgaacaaaaaaacacatacagaaagaagaactccttcatgaatgattttaccaaagattttgctcaagctctattcaatccagacaaaataaatgatttattgcgcaaagagctacaacaggctgttaataacttgctagaagctgagttgactgcctttctaggctatgatccctatgccagaaatggctggaatactggcaattctagaaatggtgcttatttccgcaaggttgatacccagtttggaccaattgaagtgcaagtgcctcgagaccgcaacggtcagtttcatcagcacacgctgcctgactacaagcagcactctgatgttttggaaagcacgattatcaagctctactccaaaggcgtaactaccagagaaatcgctgacttgattgagaaaatgtatggcagtcattatagtccagctcaagtatcaaatattttcaagcagatgctccccaaggttgaggcttatcacaagcgcaagctaagcgacaagtttttctgtgtctatttggatgcgacataccttcctttgcgccgagaaacgtttgagcgtgaagcagtatatattgccattggcattaaacctaatggacataaggaagtcattgactactgcattgctcctagtgagaacattgaagtctggacagagatgcttcaaaacatgaagtccagaggcttgaagcaagttgaactctttctttctgatggtgttgttggcatgaaaacagccttggccaggacttatcctaaagctcattttcaacgctgcctggttcatgtcatgcgcaatatctgtgctaaagtccgggtggatgaccgcgaaaagatcatgaacgaattcaagcagatacatcaacagacaagcaaaaaagaagctgcagctgtcttgcacaaattctatgccagatggaataaagcttatagccatgtcatcaaaggtttgaaggaaattgagcccgatctgctggtcttctacaattatcccaaacaaatcagagcttcaatttattcaaccaatatgattgaatcctttaacaacgtcatcaagcgtaaagctaagcctaaggcagaatttccaactgaacagtcgcttgatgcatttattggcatccaggcaatgagctacaatgaccgctatttcaaccgaattcataaaggctttggtcaggttcaggataccttagaatcttattttgaataaataattaaaaaatcaatttgcgagaaagaactatttacacaaaagatttgacaggttccattttagttagtgcaatattgtatactataaatgtaatatatgatataaataagatgcttatattatggtaaggagaaataataggcagttatgaaagaagtcacaagattagaagatatattgttcaacgttgttagacctaataaaaaaggttatgctaaggacttagccaattcctattatgtaattgatatcgttcaaccagcacaacttaataaatcagataccttgattgtgatcaaaaagaaattgattagatatggttttgatgtcaaaaatctaaagcatgatcaagctagtgactttattacttacattaaccaagattatctaaaaaattatggttatgtaattagtgacaagatttatcaggaagaaaaagcaaagctagagagcaagggaattgacttctacttctactctaagtacctcaattgtaacaatgatcaacaattgtacaactactttagaaagatgattagtcaaatgaataaagtcattctggaaagcattaaccaagttaactagtcttttatatatcacaaaaatgatatataatataaatgcctccattaatctatttttggataatgagtatgctatgtaaagaataccgtgaggtattctttttttgtagaaaggaatagtaacgtgacaagattacttattttaaatgaaaaaaagtctcaagcagaaaaatttgcggattatttaggtggaatgagtggcgaatttgaaggaaatccatatgatattgtttatgccgcaggacatttattacaactcaatgcgcctaatgaaatggttgacccaaaccttgcagctaaatatgcggattggcagaatttagataactttccttggaatcctctcgatttaaattggtcaaagcaagttattaagtccaagcaaagatacattgataatattaagagtaatttgcctggacatgatgtaattattattgcaagcgataatgacccatctggtgaaggtgatgtattaggttgggaaatagtagattatttaaactggcaaaatgaagtctggcgaattcgttttaaaggtgatgactcagctaactatgtaattgattccttacataagcctgagaaggctacagttagtgaacaagatgctcaaggaattttagtaaaaggaaaatcacgacagagatttgattttctaacaggattagaagaatcaagaattgcaactgagttggcaagagaacagggttatagtaataaaggtaaggcgctttcaataggacgcttgcagacgtatattacgtgcttagttgatgagcaaaacagagcaagaaaatcatacgttaaaaagcctttctatgaaataaggtataaggatgcaaacggcaatacatttaagcgtgactatcaagacggtgatacttggcgtttttcagacaaaaatctagtaggtcaagatttaactaattattctcaagatcaaattattattgatagcacaactgaaaaaagaacccagccgccaaagttagtcaacttggctgacttaggtaagattttccaaaaggaatatacaactgaacaaattactgatacttatcaaaaaatgtatgatgataagattgtttcttatccgagaacagaagacaacgcaattacgattgatgattttaacgagttactaccatatgcagataaaattgcagcagtcgttggaattgattcaaaactcttaagtcataaagacccacgcaaaaaattcataattaagagtgaggatcacggagccaatcgtccgaccaaattagtaccacaatcacttgaaaaagttgaagacaaatatggtaaatgtggtcgagatatttatgaacgagttgttaaatcatatctagcaatgttagctgaggactatgtatatactcaagttaaagcccatattgcaaatcatcctgattttacaagtacgattaatgttcctaaggaactaaactataagctgatttttaacgaaaatgatttaaatgaagaaaagcaatcagaaaataaggctacacattttgctcaaaacgctagccctgaagtatatcaaggtacaaatacgccaccaactaaacctactttaactttcattttgaataacttggataaatggaacttgggtactggtgcgactaaaatgcaaacaattagtaaattacaagcaattggtaaagaaaataaaaaagttattccccaattaaaagtagtaagaggtgtttttgaagtaacaggaactggcgcattgattgcttgcttagctaaagatacctatttgtcttcaggaaaaattacaaaacgcttgcaagacattttgaatgaaattaaggctgatcccacaaagcaagatatggtctactcagttgcagaaaagacaattgaacatgataaagcagttatgatagaaaatgccccattattaaatcaagatgcacaagttaaagaattagctggtgatttaaaggcaattgaaagatttagcggagtctttactcaaacaaatgaaacagtaaacccaccagttacgatttttgatggacatacgactactgaagtggagcaacaagaagctttagaagggaaacaaatcacctattcgattgaaaaatttggtaaagaagaacaacatacggcttatttagccgaacaaacgtataaaagtaaaaaaacgggtaaagagattaccagagttggttggaaagtagagtttcctgaagatactgatcacgttaaaggaatctataagcctttagctaaagagattaaatttaaaaaagaatatggacaacatgcttttagtgaggaagaaattaccagcttgttggcaggtgaagaaatcagttttgaagcgactgataagcaaggaaaaagctttacggctactggaaaattgatagaacaagaattgaaagaaggtagacgtaaaatcaggttctggggctttagagttaatcctaaacctgtagatacaaatgtctatgtagtgattacatataaagacggtaaagaatatcattttaagaaaacatatcgaggtcatcgttggacccctgaagagattaagaaaattgcggcaggaaaaaagcaaattgtagctttcaatggtcgtaaaggtacctatcgaatggagattaagcctaatcccaataagaaatacaatggcagaaaatattttggttttgatgagaaatttgctaagtagaggtagtttatgaaaataaatatgattttgtcctttctaagacgaacagcactgtttattgcaactatgtttgcattttttgtttctgctaacgcaggtgctttggcgcaatcaatttgcaaggtttctacgaagcatttaaattccaatattaattttgcgacggtcggctttggtatttcagtaataatttatatttttctcttgtcgatagggtatctaaaatcagacataaaaaaatcaaaggaactaaaagatgaaaaaaaagattcttgataaatcaattggtattggtcaaatgatagtaactttccttatttatgcggtagttcaaggattatttatgattagagccaaacaattaagctgggttgccgttatatttatatttggattaacggttgcattactgagcttgacctacggaatttaccaaagaagacttaatcaggtgaatgattggcactttactagttacaataaaactagaatgccaagatttactttaaaaaattggagtttagcttttcttggatttttagtaatttgtattttgcaaattttagcaggatttttgattaaaggggaagccactaatcaagcaaacatagctgcacatcagcaacagttgaatccaattattaatgtaatgctgattgcaattggaccactttttgaagaaattatttttaggggtattttctttaactggttctttagtaagccaaatagaaagtcaacagtctacttagcagttctcgttaatggaatagtctttggactgatccatgaaccgcaaattgatctatataccattttgtactcgctatgtgggtctgtcttagctttagtttatcttgaaactaaggatttgaccttctcttacgtaagtcaccttggcaataatttagccgtgttcttgataagcagtttataggagaaagtatatgaagaaatacgagtatgaaaaagccgcaaaagctcttttaattgaaggtcattataagctggtagatgagaatataaaatggatgcttcattcgcttaagattagaacaaagcgtctaatgatatatcgaaaatgcagtgagcaaaaagcgcttaatgaaattgtacaaataacttcaggtgctttcagtaccgaggactttagacaatattatgatagccacttgatttcgtgataacatacagctaaagcattaagtatatttgctctaaactttggtgaaacaaaaaatcgttactcatttgtggacttagagtagcgatttttgtgtgtcgtaatattttcgcatatgcaagatgtttcttcttttgtaccttcatattaccatgattttttattttttctagacttagtgctctttctgacagcttttcaataggaatcacaaatttagttttaaataaagaccaaatgcctaagatcctaaaaaccatttagtatggcaaactattgttgacatgctatataataaaaaaagttaaaatattgacattcacgttataacatcgtattattgcgttataacaattaaatggcaaagcaggtgattaaaatgttacaagatacaactaaagtttttaaagctggtaattcattgagtgtacgtttaaccaagcaagatttaactaagtttcatgtagaagatggaacagttcttgaaaaagaatatgatcctaatggtaagaagatcacgtttaaaatagttgattcaattaatcccaatttggacaactttattgatcaattttatgaagaaaataaagaattaacacgagagttagagaataaatgatctatttaaccaaaacagatttaatccatttgaatcaacggttgcttgaaaaagctggtaaaggtactgtaggtgtgcagtatccagaggggttagacgttgttattaaacagccacaacaaatattatttggacgtgaattatatccaacattatggttaaaagcggcttttatcttacagaagattactaaaaagcatatcttcgctgatggaaataaacggacttcctattatgcagcggcgttttttttacaagaaaatggatatcacttaaaagctgataaagacgatgcattaaagtttattttatatattactaatagtgaggattcagaagagaatatgtattttgctgcagattggttaaaggtgcattgcgtcaagattaagtaagtatattagcaattagaattaataaaatgtaaaagttgatttttgctcaaaatagccataggcgtaaaatccataagcaaaactcaagaaaacatcacaagcgtcactatccttagccaatgcatatagcttttttgttttaaactttggtgaaacaaaaaaatcgttactcatttgtggacttagagtagcgatttttgtgtgtcttaattttctcgcatatgcaagatgtttcttcttttgtactttcatatattaccatacgcgtggtgctagttaaatcgttctaggcaatatgcaatattgtaagccaaaatcgcaacttcaagtctttcttgaaaacctgctaagcttcttgctcggttgttctcagagttgtagtaagataataacgaaaagtcgctctcaatcgttcttctgagtgccattaaatattggttattgtgctttcgagcatttttcatattctttcgataaggtgtccaaagtaagtatcccatctgcatcaattgttgatgcagttctttacctaaatagccttcatcagctaaaagataatggtttttaggtcgagcattggcaattaattctattgtttcttttgcatcatgaattgaagccttggttaccacataatctagcaggtagccatcaccgctaacaatagcgtgaaccttaaaaccataatagtagatttgtttagtagcttttcggcatagccacgaaaaatcttcgcacgatgattacgaactggctgacagaatggtactggaaaactatcgataattaaaatgcgatctgataaatcaacttcttcattaagagcatgacggatttgataaattaatggcaaaagcatgcgtgctctacgattaaagcgagagtgagacagactagaaaagtgctcacagaatcttctttgagattcaatgcctagggtagcttgccagataagcaaagccaaaatggaactatcagatattttgcattgatcaatgtttcgccgatgtttcaatgaattttgagcataaagtttgtatatcaaacggcaaattgtattcaaacgactaaaattaacttgtgttaggatgagaaaaacgcttaagcttagggtagttcaatctagttagactcttttctattaatatgtttacaagtcgagtctaacaagattggactttttttgttaactaaaacaatttaactagcaccacgcgtattttattgtatgagactggtgaaatagattatcagcctgtaggtaacaaaatctctggaggaaaaatgactaattttgttcttgctgctattaaagcatgtaatgactttctacaaaaagaaaaacttaatctatgacaagtaataatcttggcaatgcaagaagatttagcaaataaacggcatagatttaaaagaaggcttcaaaatgattaaagacgtattttcaatagaaatggctgtaaatgcatatattattggccattttgaaataaatcatcttagctggttcaaaatgtgtaatttagtagatcaatctaaaatagtcgaacgatacctgcttaatggcgaaatattaaagattgatttagttgaaatagctaataaaaaaggaagaaataataacaggtgcggacaatattattgcaatttctgattttattcataataatttcgaattaattaatttacaggagcattcagaattaatggttatagattttgtaatttaccattaaaactgcaaaggcaaatgtgtaatagaatagtacaaatttcacaagagcaataaaactgcaagttatgcatgcaaaaggggtgcagaacttgcagttatttatttggctaattgaactatttataaaagcggttttattttactatgaatgtgatgaatgaagtgggaagtgaaataagattgagttttgtaaaagatggtttagtatttgcacaattagatgttagtgattctaccgatgctatttctacattagctgatcagttattcaagcaaggttttgtgactgaaagctataagcaagctgttttagatcgagaagagatttttccaacaggtttgccaagcggtgaaggtggcgtagcaatcccacatactgatgttaagtatgtgaataagccagttattgcatttgctacattgaaaaagccagtgtttttcaaaaatatggctgataaatcaaaagatgttgaagttagatttgtagcaatgctagctatgaaagaaccacatagtcaagtgcaactattgcaaaagcttatggaaatgttccaagaacaagaactaatgtcaaagcttgtggaatataaagattcaaaagaattatatgatgcattagcatcgtactttaactaaaagggagtggaattaaatgaaatatgtagttgattttatccagtatatagtcaacttgggaccaacagtaatgattccaattatctttttgatttttgggttatgtttgaaggtaccttttgctaaagcacttcgaggcggcttaatggtcggaatcggctttataggattaaatgcaactgttacaatattaactgatgttatgaatccagcagttcaagaaatcattaaagtcatgcatatcaatttgtcagttattgatgttggttggccttcagcatctgcaattgcatatggttcaattgtaggtgttacaatgattccattgggtatcattatcaacatgattatgctgtttaccaaaacaacatcaaccattgatattgatatttgggacttttggcactttgcttttacaggttcattagtatatgccttgactgatgacattttgcttagtcttttcttagcaagtgtaaacatggtcgtaatcatggtaattgccgacagaactgcacctttgtctgaaaagtacttaggattaccaggaatctcaattcctcatggatatgcaggttcttttgtaccatttgccgtagtaattaattggattattgataagatccctggtgttaacaagattcacttggatgctaaagactttaacaagaagtttggtaactggggtgaacctacacttttaggtttcgtaattggtttgttagttggattcttagcatatggctttgttccgggtatggattggccagacaaaataggtaagattttgttaatgggtgtaactatgtcagccgttatgattatcaccccaaaaatggctgcattattattacaaggtgttgtaccagtatctaataatattcaaaaattgactcaaaaacgctttggtggtagaaaattctacatcggtatggatactgcagtaggtatcggtagtccagttgtattggcttgtgctaccttaatgattccattatctttggtatttgccttcattttaccaggcaataaattcttaccaaccattggacttgttggatttgtcttcatgttcccattgattgtggcagtaacacacggcgacttcttccgttcctttattattggtgcaattaacgtaatcattggtttgtggattggtactaacttatcaccattctttactaaggctgctagagctgctcactttgctattccaaagaactcaacattaattggatcaattgactatgaatctaatcctttcccatggatattgttccaaatggcacacaataagtggcttgcctatgttattggtattgtagtttgtggtatcttagtaatgtggaaccgtcactgcattattaaggctgaaaaagaagctgaagcagctaaaaaagcttaataaagttaggaggatttaattatgaaaaagattattgtcgcatgtggcgctggtgttgttactagtacagcagccatgaataagttaaacgaagagctaactgatagaggctttaacgaaggtactgattacaaattagttcaaacaagtgtacaacaagtacaatcaatggcagatgaagcagatgctgctattactactactcaatatgacaatgatgaaatcaagattccagttttaaatggcttgccattattgacaggaattggcgtagatgacgttattgatcaagtagaagaaattatcaaaggttagtttaaagagttagaaatcgttaaggcaagtattttagatattgtcttaacgatttttttaggatatggataatagatggaatcaattgacacccgcaatttaattaattattttgctgagcaaaaaagatatgtgacgttagatgaattatgtaactatttcgatgtctcacaacgaacaatcttttatcggataaaaaaggctaatgctttattaacatcaaaagatattacccctataaaaaatgttagaaatttaggctatatactcaatgcacaagctataagtgcttggaagcaacaaaacatcaatgaaaataagaaccttcaacataacgaaaataaacaaaacagattgaaggaaattatctggaaattttttattcagaatagtccaataactattaatcaattaatcgatgatatggatgtttctagaaatacgataataaatgatttgaaggacattcgacaaaattattctgaactaaagctaaatattgactcaaatggtcatctactaaaaagttctgaagaagagaaaagtcgttttattttcaatgagctgcaaaaacataatagtggattaatagcacacaaaatagataagttaccatttccaattattgaagattcaaaagtaaaaagtgatatagaaattctcgaggaagatatttcctcacgatttaccgaaaacgctatttctaaattaaagagaattcttaaatttagaatatggcgaatttctatgggaaatatgattgttgacatagatataacagataatgatattcaagagagtaccgttaatgttttatctgcagttacagactttacgcaaagatatgggattggaattaaaagtgaaattttattttttagtgaattaattctttgctcgcaagccgacgcagttaattacgttacagaatcttttaaagacaaaattttagatgtagcgcaagacattgttaatagatacgcttctatttcaggcataaaaattcaatctccaaagtttgtaatagccttaagtaatcacttatatgccagttattttagaagtaagtttaattttgactttaattctgaagctttatctgatgttgtccataaattcccagaaatggttaagtttgtacaattatcttgtagtccattagctaagctgttttctaaacctatttcaattaatgaaattgctttgatcagtctgtacttcatttcatacgatgatctatcagataatatatctcatgttttagatagaaacgataatattagagatagcttgcaatcggaagttctcttagtatgtactagtggcgtaagttcatctgctattctttattctaatttgcacaaacaatatccattaatcacattttctaagtcactaagtatcgatgaattaaataaaattttacgcatccctaatacagctaaattaatcattacaacctctccattaaatacaaaaaatattgatttacctgtagtccaagttaaggcaatgatggacagtgaggatcatgtaaaagttgagaatcaattaagatactatttccctcagttattcattaatagagaaaagactttagataatttgattagcattattcaaagaaatgctcaaataaagaatatttctaatctaagaaaagatttagataattatctatatcctacaaaagatactgttaaacgtgataaaaataaacacaatttgatggatcttctgaatagaagtagtataaaaatcattgacaatctaatgaatggaacggatttgaatcctattattaaggagctatctgaagagttagaaaaaaagaatatagttacctctggttattgtgatgatatcttgagtttaattgataaatatggcccatatatgttgctttcatctgatacattcttagcgcacgcagcaccatctaagcatacaagaaaaatggaaattgaaattggaattctaaaaagacctattaaaatttccgttaataatatagaagaaaaaataaagtgtgtcattgtacttgttcctggctttcaccatgagcatgataaggcactaacacagttaattaacattattactaatcgtagattatatgatcagattttaagcgaaactgatacagataaaatgtataaactaataaaaaactcagttcagtgagatagaaagtggttcaatcatgttagaagatttaaaaaaagaagtttatgaagccaatatgcaattgcctaagttaggactagtaacctttacttggggtaacgtatctggaattgatcgtgaaaagggtctatttgtcattaagacatcaggtgttccatatgaagaattaactcctgacgatatggtagttgttaacttgaagggtgaagtagtggagggaacaagaaatccatcttcagataccccaactcatacgtatctgtataatcatttccctaaaattggtggtattgtccatacccattcaccttgggctgtatcttttgccgcagctaaaatggatattccagcaatgaacacaacccatgcagatactttctataccgatatacctgctgcagatgccttaactaaggaacaaattgaagaagattatgaaggtaatacaggtgttactatcgtaaagacttttgaagagcgtcatttagattatgaagcaactccaggcaccttagtttcccagcacggaccatttatctggggagaaacacctgctaaggcagtatataatgcaaaagtgttagaagtcgtagcagaagaggacttccatacattagaattaacccacgctaatagtcatttaccacaatacttgcttgataagcactattatcgtaagcatggtgagaatgcatattatggtcaaaacaatgctcattcacaagaccatgctaagcgtatctaaataaacttatataatacgcgtggtgctagttaaatcgttctagacaatatgccatattataagctaaaatggcaacttcgagtctctcttgaaaatctgctaaacttctagctcgattattttcagcgttgtagtaagacaaaagcgaaaaatcactctcgatggtccttctgagtgccattaaatagtgcttattgtgcttttgagcattcttcatgtttttacgatatggtgtccaaagcgtatagcccatttgctctaagcgttgatgcaggtttttgcccaaatatccttcatcgcccaaaaggtaacgattgtcaggatgagcgttagtaatcagttctactgtttccttagcatcatgaactgaggccttggttacgatataatctagcaagtagccgtcgtcgctaacaatagcgtgaaccttaaaaccataataatagatttttttggttgccttatagctaatatcggcatagccgcgaaagatcttggctcgacgattgcgaattggctgacagactggcacaggaaagctatcaataatcaaaatgtcgcctgacagatctacttcctcattaaggccatgtcgaattaaatagatcaatggcaaaagcatgcgtgctctgcgattaaagcgagagtgagataaattaacaagcttttcacaaaatcttctttgagattcaacgcccaataaagcctgccaaataagcaaggccagaatagaactgtcagatattttacatcgattgatattccgtctttgctttaatgcatctggggcataaagtttgtacaaacagcgataaattatatttaaacaactaaaactaacttgtgttaggatgagaaaaacgcttaagcttagggtagttcaatctagtcagactcttttctattaatatgtttacaagtcgagtctaacaagattggactttttttgttaactaaaacaatttaactagcaccacgcgtattaccatgattttttattttttctacacttagtgttgtttctgacggcttttcaataggattcacaaatttagttttaaataaagatcaaatgcctaagatcctaaaaaccatttagtatggcaaactattgttgacatgctatataataaaaaaagtaaaatcatatagctagtggaattgcccataaaaaagggtattagataaattaattgaagaaacgcaggaataacaccaaacagaattagctaaaaagttacatacaattcaatcaaccattgcaagaattgaacaggagaataaaatgatcacatcacatcaattatgggcaaataattcatttgtcaacatttacgcactgcatgcaacaaaaggcggtgcgataaatggttagatcaattgaagaaaaagtagaagaatactttaagagtgaacttgatagtctaggaattaggcattacggtaaaactggagaaataaatagtgaaattacatcagccttgcgacaagctgaatctaaatctggtggtgcaggcaacaattatcctgatattcaattattattagaagataatcattcacgaagagtaccagtaatgattgaagctaaaggtggcaaaaataagttagaaaaattagacaaggctggtcaaattgttcaagtgactaaatttggttcaaattctaagccgaacgcaaaaaatccacataaaaaaggtgatcctaattatagtgcaattactacatatgctactaatggtgctctgcattatggaaatgcgatcttagataactcagactgtgatgaagttatcataatgggaattaatggtactactttagatgctgaaggcaatttaaaagatcctgagcagaaagcttattatatttctaaggctaatgctggtgttccaaaacatattagacagctagattcatcgtttgatttgtttaagcaaatcaatatagataccctttttggcatattagacaaactaaatctaaatgaccgtgaactcgaaaaaattaaattagaaactgaggatgaattagaaaaaaggataaaatcaattcatcaagctttgtacgacgataagtcaattcaaaacctactgacaactaatgaaaaattgtatgtttttactggtttaatcatggcggggctacagacaaaaggagtatcacagttagagcctgctgaattaaaaggaaacataactgaaagaaacaatgatggacaaattatcttaaatcatattgcagatttcctaaatgcaagaaaagcggaaaatagcaaaattaacatgattatggctttgttacaacctatttttactaaacaagctttatggcaacctaaaaatggtgaaagtttgattcataagatatatgtgcaagtctataatgatatacttcctttgcttgaatcaaatttgcatttagattttactggtaaaattttgaactctctaaatgattgggtatcaattgataatgaccgtcaaaatgatgtggttttaacaccaagatacataacgaatatgatggctaggttagctcatacaaataaagattcgtttgtgtgggatttggcaatgggatctgcaggatttttagtgtctgcaatggatattatggttaaggatgctaaaaatacaattcaagataaacagaaactagagtgcaagattcaaaatattaaagaaaatcaattactgggtgtagaaatactgggcaatatttacattttagccgttttaaacatgatcctaatgggagatggatctagcaatatggttaatggtaatagtcatgagctgtataaaaattacacacagtttccagcaaatgtgtttttgctaaatcctccatactctgcagaaggaaaaggttttatttttgttcaagaagcattgtcacaaatgacaaaaggctatgcggcaattattattcaagaaaacgctggtagtggcaacgggctgccttacacaaaaaatattcttaaaaataatactttagttgcctctattcatatgccaactgatttatttggtggaaaagctagtgttcagactgctatttatgtatttaaagtagctagaccacatgaagaagatgatttagtaaccttcttagattttagtgaagatggatatactagaatgaaccgtaaaaaatctggtcagaaggttaatttacgtgatacagatcatgccaaagaacgttatgaagaagtagttgcaattgttagtgataaaaagcctaaaacgaattactatactgaacgaaaccataaagtaattaaagatacaatcactctagaaggcaatgattggacttataaccagcatttaaaaattgacacaacacctgcagaagaggactttaaaaggactgtggcagattatctatcgtggaaggttagtcaagttataggtggtcagaatggttaagtataaggaatttaaattaggtgatttatttgaaatacaaaaggtaaaaggtatcaacaagtctaaattagtaaatcctaatataagtacaaatgaatatgactatgttacccgaacatctttgaataatggcattgaaagcacaacagactttgtatgtgatgtcccctacaatgaacctaatacgtttagtttggggctgttacaaatgactttcttttatcgagaacgttcttggtatgcaggacagttcgtaaggaaaattattcccaaatttaaacttaatactaaaattgcgttgtactttaataccatttttagtagattgtctaaggtgttactgtctgttcttgttagacacgtggataatgtgtttagagactctaaggtgaggctacctgtaactgatgcagatgaaatagattttaattatatggaacaatatatagccgagcttgaacagcaacggctcgccgagcttgaacagcaacggctcgccgagcttgattcctatttaaaagctacaggattaaatgactatggactaactgatgaagacaagaaaatattagcatataagccaatatttcaagaatttaaaatagttgatctatttaatgtagttaatactcatagtatattgaagagtcaagtagctaaccttgaaaatggcaatgtgccatacttgacagcagcagaaggcaataatgctgttttaaaatacataaattgtcctaaagaatggatcgatgagggcaattgcgttttcattggtggaaaaactatggtagtaacttatcaagaaaaagatttttgttcgaatgatagtcataatttggcactatattttaaagattcaagatataaaagccctctaattcaacaatattttgtaggaagtgttagaaaagctttatctaaaaaatatagttgggatgactccatttcaaaagccaaaataagaagtgatagtgtaagattaccagttgtaagtaatacaaaaaatttagactttaattacatggagaagtacattagagcaattgaaaaactgacgattgctgaggctgtaaagtataaggatagagaaattttaactactgaatcactaattaataaaatgtaaaagttgcgttttagcttaaaaagccctgtattacaggattttttcttaatgaagtagaagtttataaaatttttgttgtaatttgtagtacttaaagtagttctaccgtcctttttaaagtcttactactatgattttttcttttttctacatttagcattgtttttatcgatttttcaacatggtgagcggagttttaaaaagaataaaatctaaatttctaattcgtatatcaaaatacggatatatcaaaaatactgatatatccgtatttatatagtttatttttctttaccctcaaataggtctccatgatttccgattctcacaaatctaattattgaattggtcttgtgtggcttgtagatcactacaacatcgaccgttccttcacttaaatgataatcaaaatgaccactgtaattaccaccacgtttatctaacggatgaaggtcatagtcctttccgacttttcctttttgggttaactgaataactgtattcttaaaatcttttattaactctggatgttcttttttgaactttttgtagtcttttttaaattgtggctcgtatttgatagtgtacattagttctcatccaaagatttcattaaatcatcgacattagtaaaactaggcgaatcatctgtaaccaagccctcatctttggcatcagctagaagcattgctttttcggttgttttattaggaatttctggttcagtcaagatttcaaaaggaacttttttttgtaaaaccagttgtttagctgccattacaaagtatgcattcattgaaaggcctgcagcatctaaaatcttttgcatttttctctttaaatcgtcatcaagacggattgtagttgatgatgtcataacaatcactcctttacgctatgacatcattataacatacaaatgatgtcattatggtacaaataaagcttaaaaaatagaaggtgttagaaaacagcaattttatcttttttaattttacacttgaattcttataaaaataaaaacgatagttgttgaaatattgtaaatatgatatataatataaatataagttaaacataaataacttatacatagcatatgaatagaacctgtcaaatcttttgtgtaaatagttctttctcgcaaattgattttttaattatttattcaaaataagattctaaggtatcctgaacctgaccaaagcctttatgaattcggttgaaatagcggtcattgtagctcattgcctggatgccaataaatgcatcaagcgactgttcagttggaaattctgccttaggcttagctttacgcttgatgacgttgttaaaggattcaatcatattggttgaataaattgaagctctgatttgtttgggataattgtagaagaccagcagatcgggctcaatttccttcaaacctttgatgacatggctataagctttattccatctggcatagaatttgtgcaagacagctgcagcttcttttttgcttgtctgttgatgtatctgcttgaattcgttcatgatcttttcgcggtcatccacccggactttagcacagatattgcgcatgacatgaaccaggcagcgttgaaaatgagctttaggataagtcctggccaaggctgttttcatgccaacaacaccatcagaaagaaagagttcaacttgcttcaagcctctggacttcatgttttgaagcatctctgtccagacttcaatgttctcactaggagcaatgcagtagtcaatgacttccttatgtccattaggtttaatgccaatggcaatatatactgcttcacgctcaaacgtttctcggcgcaaaggaaggtatgtcgcatccaaatagacacagaaaaacttgtcgcttagcttgcgcttgtgataagcctcaaccttggggagcatctgcttgaaaatatttgatacttgagctggactataatgactgccatacattttctcaatcaagtcagcgatttctctggtagttacgcctttggagtagagcttgataatcgtgctttccaaaacatcagagtgctgcttgtagtcaggcagcgtgtgctgatgaaactgaccgttgcggtctcgaggcacttgcacttcaattggtccaaactgggtatcaaccttgcggaaataagcaccatttctagaattgccagtattccagccatttctggcatagggatcatagcctagaaaggcagtcaactcagcttctagcaagttattaacagcctgttgtagctctttgcgcaataaatcatttattttgtctggattgaatagagcttgagcaaaatctttggtaaaatcattcatgaaggagttcttctttctgtatgtgtttttttgttcaaaccaatcatacgagaaaggaactcctttttctaatgtttaaagaaataaatttaaggaatcattcatccttacacaaactattttacggtctcccattacaaataatgtataaagcaaatatacattaaatataaactaagtatatgtaatgtataaataaaatatgaggtaatgctaatgaaagtatatacatcgagtggcgtatacgagatcaaagaacatagggtaaaaattttgaaattagaaaaaatgatcgtaattatcaagtaggtgatttactcttgctagaagaatatgatccaacaacagaaaattacacagggcgtgaggttcattgcttgatcacttatatgacgacttttaaacaagcgccaggatatgttgttttgggtaccaagaaattaggtatagtacagtaatgattaagggggattttttctatgagttttaacccaaatcaaggcaaaaagtttgcagaagtattgaaggaaacacctagagttaatgatgactctggtaaggaaatatcttctaaagaatcaagtaattatattaaaagagaaaagagaagaccttacacttttagtttgatgccaagtgcaagaactaaattgacagagattgcaaaagaacatggatatagctcatcttctagtttcttgaatgatgtgattttgcaaggcaagttgtagacaatgaattctaacaacatatatttaaactatatgtattgttgtattaaaagtcattctagaatcaagtttcatagaatgacttttttgtattgggagctaagacaaagcttctaagtctgaattttattgttagccagggtatccaaaaaggtatccaacttcaaaattaactaaaaccaacaaacatcaaaatggcttaatttcagtacttagaagtaattaaaagtaactaaaagtaaagatagctcccctaagggcaaaagcatgaaagataagtcagctgcttatgttcaacaggcaactgatgccattaaccgcaaacatcgtcgaatcctccaatatcacacagcagaagaactcttcaagcaatacgttccttcatagcctaactgttgcacttaatttgacaattcaggatcaaataagttataataattttattgatgtgttcaactacatttttatatttttgcactgaaatcttaattcagtgcttttttcataaggattagactaaataagatgataatacgccagcgaaaaaattatttaacttctcaatttttatctaagattagtgccgatgggactttaaatattgaaaatttaattgtcctgacttgtgcaatttttattgcaagtattggactaaatgttaattcaacagctactattattggcgcaatgttgatttctcctctgatgggaccactactagcaattggcacaggtcttgctttatatgatgttcacttactgcgtaaaggaacaatttcattattagcagaaattattatcagtttagctgcatctacaatttattttcatttttctcctttgacttatgctagtcaagagattattgcatgaacttcaccaacaatctgggatgcgatgattgcgttttttggaggggtcgctggaataatcggagctcgcaaaaaagaagcaaataatattgtacctggtgtagcgattgcaacagccttaatgccaccggcttgtacgatagggtattcaattgcggcaggtaatcttaaatattttttaggatcaagctatttatttttgattaactgtgttttcataattttgactgcattcatgggtgtaaaaattatgaagtggttaagttattctactaagcaatctaagttgtttttcttgcacaagccgacctttaaagagtttgtgataattttagtagtaattattttaattattcctagtatcttgtcagctaatcagatggtgaataaaactctagtagatcaaaatgttcaaaatcttgttgttaatgaattaggcaatgttaatttaattaaggaaaatgttgatacgcaaggaaaaataattaatcttacagtttcaggcgataaaattaacgctaagaaaattcaagcggctaaagcaaacttaacaaaatatgacctgaaaggctattcactgaatattgtacaagtagctcaggttaatcccaatgcagaaaatcaattagatcgacaagtaaataatattattaatcagcgtcagcatgaacaagaacaagctgatgaaaaacgtcaacaagaacaagaaaaacgtaatcaaaaaattcgcaaactgtcatctgcaatatcttctgttactgcagttagtgataataaaaataagcaaattactttgatagagttaaaaaagccgctatctaagaagagaaaaaacgccttagtaagacaaataaaagataaatatccaaatattaatttagtggaatttgttcaagaaaatattaaaaattagaagaaactgtcaaattttttgtgtaaatagatttttctcgtagattgattttttaatcttttatttaatcaaagtagaattctaaggtatcctgaacctgaccaaagcctttgtggattcgattgaaatagcgttcgttgtagctcattgcttgaatgccaataaaagtatcaagcgactgttcatttgaaaactctgctttaggtttagctttacgcttgataacgttgttaaaggattcgatcatattggtggagtaaattgaaaccctgatctgcttaggatagctgtaaaagaccagcagatcaggttcaatctctttgagatttctgatgacatggttgtacgctctgttccacttgtcatagaaggcgtgcaagactttgatcgcagcttctttatttggctgttgatggatttgcttgaattcattcatgatattttcgcgatcatctacgcgtactttagcgcagatattgcgcatgacatgtaccagacagcgttgaaaatgagctttgggatatgtcttttccagtaccgtcttcatgcccacaacgccatctgaaagaaagagctcaacctgttctagaccgcgagacttcatgtcttgaagcatttccgtccaattctcgacgttttcgctgggagcaatgcggttaatcgatgacttccttgtggccattaggcttgatgccaatggcaatataaactgcttcacgatcaaaggttatgcgacgcaaagtaatgtaagttgcgtccaaataaatacagaagaacttatcgctaagcttgcgttgatgataggcttcaacttttggaatcatctgcttggagatgttagatacctgagctgggctgtagtgactgccgtacatcttttcaattaaatcggctatttctctggtggttacgcctttggaatatagcttgataatcatgctttccaagacatcggagtgctgcctgtagtcaggcagcgtgtgctgatgaaacatgccgttgcggtccctaggcacctgaatttcaatctcgccaaattgcgtatcaactttacggaaataagcaccattgcgtgaattgcctgtattccagccagctctggcataaggatcatagcctaaaaacgcagtcagttcagcttccaataagtcattaactgcttgctggagttctttgcgcaataaatcgtttattttgtcttgattgaatagagcttgtgccatatttttggtaaaatcattcatgaaggagttcttctttccgtatgtgttttttgttcaaaccaatcatacgagaaaggaactcctttttctaatgtttaaagaaataaatttaaggaatcattcatccttacacaaactattttacggtctctccaaagaaactgtcaaatcttttgtgtaaatagatctttctcgtaaattgattttttaattatttatttaatcaaagtaggattctaaggtgtcctgaacctgaccaaagcctttatgaattcgattgaaataacggtcattgtagctcattgcctgaatgccaataaaagcatcaagcgactgttcagttggaaactatgccttaggcttagctttgcgcttgatcacattgttaaatgattcaatcatgttagtcgaataaattgaagctctgatctgcttgggatagttataaaagaccagcagatctggttctatgtctttcaagcttctgataacatggctgtaaaccttgccccatttggtatagaagtcatgcaggacagctgtggcttcttctttgtttgtctgttgatgcacctgtttgaattcgttcatgatcttttcacgatcgtcgacgcgtactttagcgcagatattgcgcatgacatgaaccaaacagcgttgaaaatgagctttaggataagtcctggccaaggctgttttcatgccaacaacaccatcagaaagaaaaagctcaacttgctttaagcctcgggatttcatgttttgaagcatatctgtccagacttcaatgttctcgctaggtgcaatgcagtagtcaatgacctccttgtgcccattaggcttgatgccaatggcaatatagactgcttcacgctcaaatgtttctcggcgcaaaggaaggtatgtcgcatccaaatagacgcagaaaaacttgtcgcttagcttgcgtttgtggtaagcctcaacctttggaatcatctgcttggaaatatttgatacctgagctggactgtaatggctgccatacatcttttcaattagatcggctatttccctggtggtcacgcccttggagtaaagcttgataatcatgctttccaagatatccgagtgctgcttgtagtcaggcagcgtgtgctgatgaaattgaccgttgcgatcccgaggcacttgcacttcaattgggccaaattgcgtatcaactttgcggaaataagcaccatttctagagttgccagtattccagccatttctggcatagggatcatagcccagaaaggcggtcaattcagcttctaacaagttattaacagcctgttgtagctctttgcgcaataaatcatttattttgtctggattgaatagagcttgagcaaaatctttggtaaaatcattcatgaaggagttcttctttctgtatgtgtttttttgttcaaaccaatcatacgagaaaggaactcctttttctaatgtttaaagaaataaatttaaggaatcattcatccttacacaaactattttacagtctctatccaaagcgcgacttgcttttctcattaatatcattgataaagcagagataataatcagaactattgcaataacacttgcatttttccagttacctaatgtcatggcttgttggtaaatcaaggtagacattactaaatttttattacctcccaaaatttgtggggtagtatatgctgtcatcgcacctgcaaagaccaaaatgcatcctgttaaaatccctgagactaattgtggtattacaatttttatcaaattaacccatggattggcgcctaatacagcagcagcttcttctgcttcaatgtttagctcagaaatactaccaactaatgaaataatcataatcgggagaaataaataagctgaaccgatgataattgccgtatcagtataaagaatgtttaatggagaattaattaaatgaatagacatcagaaatttatttagaataccgttacgacctaaaataatgatccatgcaaagtttctgacaactgcattcgttaacattggaaaaagaatgataattgttaaaattgatcttactttgctcttttgacgagcaatccaaagtgaaattggaattccaagaattaaaacaatgatcatagtgagtaaagcaattttaaatgttctaccaattacatgaagattgtacgtgttttttagaaattcagtgtataggtgcaaaaatcctttagaatcttgaaatgttggtatagcaatctgaattaatggaaagaatgcaaaaatcaagacactaataaatgccggaaatagcagccaaaaactggattttattttcatattgttcgtattcctccttatcttgtcttagaataatttaaatgtaaaaataagtcaatacaaaatatgaattaaaataataacatttgtgttaattgtatgcgtattgtattatttatgaatataaatagatttatttataaatttatcttcttgaaaatacgaacattaccaaaaaggaagtggagttcttaatgaaaaagccagttattattagtacagatccaggaatagatgacgcagttgcattagcaatatgtcttttttcgcctgcaattgaagttaaaagtattattgcaactaatggcaatgttaatgcgcaacaagctttaataaatatattgaaattggagaaatttttcggtaaaagtattcctgtagtaaaaggggtagagcgttcattagtcaaacaatctattcgagctaaagaaatacatggtaaatcaggaatggacggatatgattttccaaatcctagttttgaattggtggatcatggcatatcaccggttgccatacataaaatagttgcagcttcttctgaaaaagtaactcttattggaattgcaccacttactgattacgctctatatgttcgtttatactcagatgatataaaaaatattaaggaactaattattatgggcggagcaatgggtagaggtaattatggtatctattctgaattcaatattgcatctgatcctgaagctgcaaaaatcatttttgaaagtggattaaaaattagagtagcgcctttagaattaggtgcacaagctaaaattatgcctgaagtaagtaatcaaatacgacagttaggaaaagctggtgatatgttttacgacttatttaagaaatttcgaggtggcagttttcaaactggccttaaaatttatgatgcacttgcagcaggcgtacttttaaatccgcaaatgtttaaatttaaaaatacacatgtagaaattgatgttcaaaccggttatacatatggtgcttcattgatggattttaaaaataagctagatcttccaaataatgctgaaatagcagtgtctgtagatccagaaattttttctaaatggtttgtagaagctttatcaaaaacaagataaaaaagtcaattaattgtcaacaattaattgacggataatggttaagcgagtatactactactagttgagaacaagaagaagcacccgcttctcgcctaagttaagtaaacctctaggctgattgataatttctgttgattaaaggcgggtatgattcttataacccgcctttttcttgtcctcaaattaacacggaggtgaacagttataccaagaagtttaatcttaaacgacagaattcgcgctcgcgaagttcgtttaattgatgaagatggtcagcaagttggtgtgatgagtaaaagtgatgccttacgtcgtgcaagcgatgcaggtcttgacttagctctgatttctccaaatgctaagccacctgtagcacgtatcatggattacgggaagtaccgctttgaacaacaaaagaagcttaaggaagcccgtaagaattccaagacagtcagtgtcaaagaaattcgtttgagtccaactattgaaggtaacgacttcgaaactaaacttaagcacgttcgtaagttcatttctaaagaaggagctaaggttcgcgtctcaattcgttttagaggtcgtgccatcactcacaaggaattaggtcaacaagtacttgaaaaaatggccgaagtaacctcagacattgctaatgtaattagtaagcctaagatggaaggtcgttcaatgttcttgatgcttgcacctaagagtgataaggacaaaaagaaaaagtagttaattggaggaaatagaaatatgccaaagatgaaaacacaccgcgcttctgctaagcgttttaagagaactgcaaatggtggtttaaagcgtcaccacgcatttactggtcaccgtttccacggtaagacaaagaagcaacgtcgtcacttgagaaaagctgctatggtttcaaagagtgatatgaagcgtatcaagcaaatggttgctcaaatgcactaatacttgttcttaattaagacagactatagtaggaggaattttaaatgccaagagttaaaggtggaacagtaacacgtcaacgtcgtaagaagatcatgaagcttgccaagggttaccgtggcgcaaagcacatgcaatttaaggctgcaagcactcaattattcgtttcatacaagtacgcattccgcgaccgtagaagacgtaagagtgaattcagaaagttatggattgctcgtattaacgcagctgcaagacaaaacgacatctcatattctaagttaatgcacggcttgaagttggctggtgttgacatgaaccgtaagatgttagctgatattgcttacaacgactcaaagacttttgcacaattagcagaaactgctaagaaagctttgaactaataacaaaagaaataagctagggaaattttcctagcttatttttttatctatttttgaattaatgctcgtaatctaattttttcatctggcgtagtaaaggccgcgtcaaccgcgttgagataaagagtggtttcttcttcaggagtcaaggcggtcttttcttcaagcagttggtattcatgcggtaaattggtattggaaacgatcatatcatcagaatttagcgtgactttcattcccatgtgcaataatttttttattgggtaagaatcaatctgatcaaaagctttggtgttcatatttgaagtggcgcaacattccaatatgatttggtgatcaatcagatattgggtaagtgctggatcttcagtgcagcgaatgccatggccgatccgtttcgcgccaatttttaatgcttgacggattgaatcaggtcccgcagcctcaccagcatggatggtataaggaaggtgtaattcttgggcacgattgaaaaaatgctggtagttaatgtgagggatcgggccttccgcaccagctaggtcaaggccaacaacgccatgacctaaaaattctttcgctagctcaaccgtttccatgttttctttttcattgtgggcgaagcgcatcaaacagagaattaaaccagcgtgtaattcaggctgatctttgtctgctttttgtttttgataaaacttcgtaataccgctgactgctgcagcgattacttgtctttgcgttaaaccatttttagtatgtaattgcggtgcaaagcggatctcggcgtagactagaccttgttgttttaattcgcaaagaagatcaaacacaatcatctccagatcatgctttgtcttcattaactggttaggtaagtcaaacttttccaaaaattgttccaagctagcgcaagaattatcaactgacaattcttgccgcaatttttgatcagttaactgtggcatgtgatgttcctgcattaacttcttaacagtagcaactgggacagaaccgtcgaggtgaaggtgtaaatcgatgaattttctcatggtgatcctttctgttgattgatgattttgcttaaattgtttagtattgtaacactttttcatcagaaaaaaacaaaaatttctaaagcaaacccatttttgatatgatataaggtgataaaaaatggaggaaattaacagttaaaagatagacaagatacaaagatctgttcagaaatataaaacatagaagcaggtcaaaaactaaaaatttaatattttgttcgcttgtatttatttcactctttgctaaatttatgtttgtattggaggtgaaacaaatgatcaaggctcaagtagtcgaattaaaacctaacaagaccatgcaacaagagctggataagctttgtgattatcgcagatattgctggaatcaagctttagccacttggcaagacatgtatgaagcacgaaccttagataaggataataatcccagtccaaatgagcgcagaatacgtgatgagctagtcgataataaggcagactggcagtttgctctgtctgctagatgcttgcaattagcagtcaaagatttggctaatgcttggaagaatttctttgataaggcacagcctgattgggggaaaccacatttcaaatcaaagaaggccccgcgacaaggctttaagactgaccgggctaaagtggttaatggtaagctacgcttagacaagcccagaggcattaaaacctggttcgatattccaacatatgaagctttaaaaatgaagcaaattaaagttgctagtgtctttagagaaagaggacattattatgccgctctttcttatgaagaagaaactttggtaaagcctagaacaggtagaaagacagctgttgatgttaatgtgggacatttcaactacactgggggcaaaatcaatgttttgccatcaagattgcaaaaactatacaagcgcattaagcattatcagagaatgctggctaagaaaagacgggctaatggcaagttagctggccaaagcaataattacgtgcaagtgagaaccaaactgcaacgtgattatcgtaaagtagccaacattcaaaacgatcttttgcaaaaattcactacaaaattggttaataattatgatcaaatagtgattgaagacctagccgttaaacaaatgatgatgacgcacgtcgcttcaaaaggcatgcagagatcattattcagtaagtttagacagatattgacttataaatgtgagtggtatggcaaagaattaatcttggctgataaaacatatccatcaacccaaagatgtgctaattgtggttatgttaaaaaaggtgatgaaaaaatcactttgcaaggcaaccaaaaacatcacactaagcacaatgagcatatttgttatgaatgcggttatactaatgatcgtgatgataatgcagtgttaaatcttttagctttagcaaaataatgaaaacggggctggctaagcccttaagctgcaagagttagtcaatgcgattactcctagattggaatattggaatactaatgatgacagcagtaaataaagcgaagaaaggaaggactatatttctttctgatatgtaaaaaaatatacattcttctacatatttctatgttttatatagcagtgttgatatgctttttagaccaaaatatacaattgatacgatttacaatctggacccccagaagttgaatgaaatggacattaaggcggttttttcagacctagataatacattgctcgcctggaataaatttgaaactgccaaagaaatggataattttaatcaaaagttagccaaggcgggaatcactctcgtggtcatttctaacaataatgctcaaagagtgggcaaggtacttgatccttaccatatcgaatttgtcgctaagtcacgtaagccattgccatttgcgatcaccaagaagcgcgaagcaatgcatttgcaaaaagatcaggttatgatggttggcgaccaactaatcactgacatgcaagcagggaatttggccggcgtgaagactgttctagttaagccattagttgaaactgataagtggaatacgagaatcaatcgtttctttgaaaaaattatctttttcttcctgggtttatcacatcgagtaacatttaagaaggagctatcaaatggatgaggatattatttgtatcggctgcggtgccaagctgcaatccgatgatcctgaaaaagcaggttatctgccaaaaagtgcactagataaggcaaagcaagaagaaaatgcggatgtttattgtcaacgttgcttcagattgcgccattataacgaaatcatgccagttgatttgaacaacgatgattttttagctttgcttaactctttaggacaaaagaaagctttaattgttaatgtagttgacttatttgatttttcaaattctttgctatcatcattgaagcgttttgttggaaataatgattttattttagttggtaataaatttgatctatttcctaaaaactctaagcaaagtaagattaaggattggatgagacaagaagctaaccgaatggggctttatcctaaggaaatcttcttggtttcagctaaaaagaagttgaacttggaagatttgatcgcttatattaataagcaatcgcaagacaaagatgtctattttgtagggacaactaatgttggtaagtcaactttaatcaatgccattattgacatgatgggtgatattcaagacctgatcaccgcttcacgctttcctggaactactttagacaaaattgaaattcctctagaaaatggtcactttttgattgatacgcccgggatcatgaccgagaatcaattggctacgcacttaaatgctaaggatttggagctggtctcacctaagaagcctttaaagccagctacttaccaattattgcctggtaatactttattcttagctggtttgggacggattgattatctcaagggcgaatcgactagctttactgtttacgttgctcgtggaatgtatattcaccgtactaagacagctaatgcggatgacttttataaaaagcataaaggtgaattgttatccccaccagctgcagatgatgaaatggcaccactaaagggtcaagaatttagaacggaatataagagtgaccttttatttggtggaattggttttgtgactgtacccaagggatgcgttgttaagacttacacaccagatgggattggtttaggtattcgtcgtgcattgatttagaggtttgcatatggttaatccaaaatgtattgaaaaaatgccaactgctaaagttgaagcagaattggaacaagaacaaggtaaaggtcgtcagattgggattatgggtggtacctttaatccggtgcatattgcgcacttggtagcggcagagcaagcaatgactaagttgaagctggatgaggtctggtttattccggataatattccaccgcataaaaatgctccgctgacttctgctaaagatcgggcaacgatgcttgatttagctacgcgcgataatcctaactttagggtaaaactattggaattgttccgaggcggcgtttcttatactgtggatactatgcgttatctcaaggaaaaagcacctcagaatgactattatttgattatgggcagtgatcaggttaacagtttccatacttggaaggaagctccgaccctggctaaactagtaacattggtcggaattcgtcgtccaggttatccacaagatccgcaatatcccatgatttgggttgacgcaccagatattcgcctaagttcgactgctattcgtcgcagtgtcgcaactggcacttcaattcgttacttggtaccagaagccgtcagagaatatattgaagaaaaggggctttaccttgacgaaactaatttttaaaaatacttattcaccattctctagtgaacaaattgttgctaaagaaaaggcaaacatgaagaaaaaacgttttgaacattgtgttcgtgttagtgaaactgcacgtaagttggctaagttaaatggatatgatgaagaaaaagcagccttagctggctttgttcatgattatgccaagcaggtaccggtagaagagtatcgtaaggtaattaaggaacaggattttgatccagatttgcttaattggaatcgggccatctggcatggcattgtggggattttctttattgaacgtgatttaaaaattagggatcctgagattttaactgccgtacgtcgtcatacgactggtgatactaagatgactacattagataaaattatctttgtagctgattttattgaacccggacgagattttccaggagttgaagaagcgcgcaaagttgcttatgctagtcttgatgaaggggtaggctatgaattgcagcacaccttagagtttttaattgaaaataaaaataaagtatatcctcgtactttagaagcatacaatgtatggggaattaagtaataaaaaggagaaaaatattgactagtcaagaaattttagattttactacccaagcaattagtgaccgtcatggtgaagatactgaagcttacgatatgcgtggaatcagtattttagctgattactatgttattaccagtgcaggctctaatcgtcaattacatgcgatcgttaactcaattgttgatgcggctcacgaaaacaactacactgactaccgtattgaaggtaccagagattctaactggcttttgctcgatttaggtgatgttgtagtcaacgtctttactaaggaagcacgtgaattttataacttggaaaagctatgggctaacggtaagcaagttgaattgaaggaagattaagcaatgagtgttgttgggattattgcggaatttaatcctttccatagtggacatgagttcttgctaaatcaagcacgcttggttgctggtaatgatccaattgtggtgctcatgtctggtaactacgtgcaacgtggtgagatggcgattatgagcaagtgggagcgggctaaggtggctttgcaatctggtgccgatttggtatttgaaacaccattttcaacggcagtagaaccagctgatctttttgctctcggaaacattgaacaacttgctaaattaggcgtaactgatttagtctttggtgtagaagatgctaacctgaattttgcttatttgggtaaaagaattgcggaaattccccagaatcacatggattttagagattatagccaaacttattcaacacaatacaaccaaatggtagcgcatgaagtaggctatgaagttaatcagccaaatgctattttggggttagcgtattcagtagctaatcataatttaggttcaccattaaatctgcatccggtcaaccgaattggagcaggacatgatgaccttttacaaagagaaaaagttgtccaaagtgctagtgcgattcgaaatttattattgcatggtgaagatacaaaaaatttaaagtattggatgcctaaagcagaagcaatggtgttagctgagcagaaaatttatcctaattggaatttgctatatccatttttgaagtatcaaattgaatcatcttcagttgaagaattgcgtcatatttatcaaatgagcgaagggcttgaatataagatgaaacaagagattcatttagcccgcgattttacagaatttttgcggcatatcaagtccaagcgttatacttattcccgtttgcgccgtttgagcttatatactttgcttaatgtcactcaggatgatatattggctagctttaatcatgagtctttgatgctcttaggctttagtaaggtaggtcgcaaatatttaaagcaacagcgcaaggaatttcagacagaaatcgtctctaaagttgataaaagaagtgctaagaacggctctttagctttacaagttagggtagaccgtttatttgaacaaataatgggcgttgatcaaaactttggtcgacggccaatcgaggtgtaaaaatgttagaacttagtttttctaggattcaaaattccaaggaaccattaactcacattgaacgtgatttggaaatgcgtccagaattttttaagcgtagtaaagatctactaattgatgcgaaaaatgtaaaagtgagcggtgacttgttctatcaagaaccatttgtgactggcagttttcatgtggccgctgatctggttgtgccatcaagcagaagccttaagccggtaaactatcatgaagattttacttttactgaaaactaccttgatcgtaagccaaccaaggaagaattggaagaaaacgatactattgtacaagttgagaatgaccaaattgacttgcaaacagcggtagaagataatattttactccatattccaactactattttgactcctgaagaaaaagaaaagaatattttcccagagggtcaaggttgggaagttgtttctgaaacctcttttgaagaaggcaagaagaaccaagttaacccagcttttgctaaattgaaggtcttgcttgatgggcaagataatgataaggacaataaaaataagtaataaatgtaattgaaaaatatggtggacaatcaaagaaaatttttactttgattgttttttaatcttgtgttagaagcacttttaaagtatcctttaattataaaagcattttttaattaatttattagtattagaaaaccaaattgatctacgaggaaatgaattaacatggcaaaaattctaattattgaagatgaaaagaacttatctcgctttgtcgagcttgaattgcaacatgaaaattacgagactgttgttgagaataatggtcgtaagggattagaagatgcattgagtcaagactttgatgctatcttgcttgacttgatgttacctgatttaaatgggttggaaattgcacgtcgtgttcgtcaagttaagactacgccaattatcatgatgactgcacgtgattcagtgatcgaccgtgtttctggtttggatcatggcgctgacgattatattgttaagccttttgcaattgaagaacttttagctcgtcttcgcgcagtgttacgtcgcgttaaaatcgaaaaggacgcatcaaaggttactgttgctaagcaaaagattgtaaaatttaaagatttgacaattgaaactgctaaccgaattgtgcaccgtggtgatggcaaggcaatcgatttaactaaacgcgaatacaacttattaatgaccttgattgaaaataagaacaacgtagttagtcgtgatcaattattaaacaagatctggggtccagaatctaatatcgaaactaacgtagttgaagtttatgtacgttatttacgtaataagattgacgctccaggtcaaccatcttacattaagacggttcgtggtaccggttatatggtaagagatgaagatgatgatcaagaataaagacgaggaaaaagaggccaagcactcatccctaattgtgcgatgggttagtatcgttgcattaacgattacggtctcttttgtcatattttcagttgttgcctatcaaattgttagtcatcaatcgatggaacagcaacaagagacatctaataatgtagttaccacgatggaccggacattaagttctattcaagatgagctagagatctcaaatgtaattcctgctctgtcaccgtctaccaggcgtattttgaggggcggtcctgctattagcaaaaaagatacagagaataaagcatttagtgatagcctgatttcatcgatttcgaatccagatattaatgtagcagtttacaacaaacatgatgaaattgtttttactaatggtaattctgcacctaagctaaaagaatttgccggcaaccaacttgaagaagtagtaaaccgaaaaaaaggcaaaatgcttttaacctaccagaaaatctattctgaggtaaatggcaaattaactggctatgtagtggtttctaatagtatgacttattacaatagcttgatgagtaatttgcttcattggatggtaattatttcactgattgcaataattatcttcattgcaatttcttatattttggttgttaatgtagttcggccaattaagacgatgtctaaggtggctaaggaagttaatgctgatcctaatagtgaggctagaattaaggaactacatcgagatgatgagttagaagaattagctacttcgattaatcaaatgctagaccggatgcaaggttacattgagcaacaaaagcaatttgttggtgatgtctcacatgaattaaggacaccagtggcagtaattgaagggcatttgaacctgcttgaaagatggggcaaggatgatccgcagattttggatgaatcaattaaggcttcgttgcaagaagctgatcggatgaaacatttaattcaggaaatgcttgatttaactcgagccgagcaaatcgatgttcaatatccgtatgaagtaagtgatgttaatgaaatcatccgcagagtggtcgctgatatggcaatggttcatcctgacttcaagattcagctggatgaggatgatttacctgatgatacagagattcaaatgtatcacggtcatttggaacagttgctagtaattttgatcgataatgggattaaatattcgactgatcgcaagcagattaatgtttcagctggtgtaactaagaagaatgttaatattattgtgcaagactttggtgaggggatttctgaagaagatcaaaagaaaatcttcaatcgcttctatcgtgtggataaggctagaacccgtgaaaaaggtggcaatggtttaggtctatcgattgcacaaaaattagttgctagttataacggaacaattagtgttgaatctgttgagggtcagggcagccagtttaaattgaagttccctcggttgactaagaaaaaagccgctaagttaagaaaattaaatgagaagaaacaaatgcctaagagcaatcttgaggcataaacaaaatcctattaaatcaaggtttgggtaccaagatttaataggactttttttctctagaggcttaggtattagaaaataagaaataaaatgcttcgaaaataattataattgttcccggatttaaaattgaagtgcaacactaagtgttaaacaaaaaggccatgaagacctaaacttgaagtgacgaaaaatcaagaaaggaagatcttcatgaccaattcaaattctagcatttctaagcactatcatcaattaaccagcgtacaacgtggacaaattcaagcaatgctggattccggcataacttcccgtactgttatcgctcaagaagttggctgccataagtcgacaatcagtcgcgaaatcaaacgcggaagcgtcctgcaaagagacagcagctatttattgtatgagcactattacgctgatactgcacagatttattatgagaagcgtcgcaaaaactgctatcagcgcaatccattgaagcattatgctgtctttttgagaatgctctccagacgctttaaagctaaatttgatgccaccagcatcgatgagttcgttggtgaattccaaaggactatgccaggctacccttgtcccagcacaccaaccgtctatcgctatattgatcagggcttgctggacataagcaatattgatctgcctatgaagctcaaaagacgcaggaacaagcgtcatcacagccatggcggtcacgctttgcacaagaagcatcttggcaattccattgaacagcgtcctaaggaggttgaagacagaaaagctccgctgcactgggaaggagatctggttaaaggcgtcagacgcaagaatcagcctgctttaatgactttgactgaaagaaccacacgctttgaagtagttatcaagattcctgactatcgggcaagcacatgccaaaggctgcttcaaaaggagattgacagacatcctgcctggtttaaatcaatcacgtttgacaatggctctgagtttgcggatatgaccaagatcaagggctgccagatttactttgctcacccatattctccatgggaaaggggcaccaatgagaactgcaatggtcttttgcgtcaattcttccctaagggcaagagcatgaaagacaagtcaaaagcttatgttcaacaggcaactgatgccattaaccacaaatatcgccgaatcctccaatatcacacagcagaggaactcttcaagcaatatatctcttcataacctaactgttgcacttaatttgacaattcaggaattataattgttattaatttaagcgatttaattagctaaaaatatttaaacttaagtcatgtggtaataagtcaaatgaaaggcgatgatatttgttctttttgatcataaatttgagtatatgaaactaagccttggtaaaggttgatttttttaatgttaaacttttgtttacttttaaatttagaccaatttttgaaattaagacctcggtgtcctgtacagtttgtcatctttgagcaatttaaagataactcgtactaattttcttgcagttaatgtgcaagcacgtttatgcggcgagtagacagcttcatcatacttcttttggtaatattttttgaaaacaggatcatgtaatcttgctagattggcagcttcaatcaagtaatatcttagatatctgtttccagtcctggccattggagtatgttcgttgctgtgatctcccgattgatattgattccaggttaggccggcatacttagccagctgttcttctttatcaaagcgatcgatacttccgatctcagcgataataccagctgtataggttttgccaataccgggaattgattccagaattttgctttctggtaatgcatcaacgatacgatcaattgctttttctagatctttaatagattcattaaagctttgaatcatgttgtaatgaacagaaagcactgcatcaattgaatcagtcattactttgcctaagcgatatgaacctctaacagctttcttaattgctttagccaaggtatctggatcggaaaagcgtcctctgcctttaacctgtaagtaagaaattaagtcttcggtaggcatatccgcgatctcatccagagttttactatcggttacaatagacatcattgtagcaccgaaaagaggagtattaatcttatctttatcgacagtgattagtttattaacccgataatataaagcttcaatgaagtgctgtttggtacgagtcagttcttgaactaattcatatctggtacgcgttaaacgctctaaagcaagatagttgtcttgtctggcaatgcttactcgataatgtccaaagcttagatacaaagcaatgtaataagcatcgagaggatcagttttactttcttcaaagactttatgaaacctgctggtttctttggggttaattacatcagtctctacattgagcttttgtaaatcttcgtcattttggaaaaagtaagcaggatgaaaactgtaaatagatgtagcttccatgccaataatgatttgatcatagtgtttattttgagctagatctaaaatttgttttttcagttcactagcaccataaagatcattgacaaagctatcgttaattaagcgtttgttttgatcttctgaatcaagtgcaacgacctgtaaatctttagaactaacatcaataccgacaaataatttcattggaaatggcctcctttctttcaaatttctgatcatagattttgatcttcacatgttaacccctaattacagttcttaagttcaatctcgccagtataagtattcactggttgcttctttgaaagctgcacctaatcccaattgctcaaggactagcaaaaagaagcaatcaatacagcatgtgagttagagcataaaggaactgtctgggtggcagacttataaagcagacaaaactgcaggaggtgataacctagaccagttgaccaaagccaatgacaattagaggctaacatgtgaagatcaaaaagcaaatactaatttgattaattatcacaatatgactaattacaatttatataatacgagggatgtgacataatgaaagaacgcattttttcaaggaaattctggcagaaagtttttaactatcaattgattatctggtttctcttgatgattagttatactttttctcagcggaataatcatttttattttataggggatttgttcaatctagcttttagtacggcgatcatgggattgaacttttacgtgcaatttaaaaaggattccagcaagactaatactcaaattgttcgctggctgaccatagtaatttttcctttcaatttttgccaaatttggcatatcactgggaattttttgctaaaaaacctgccggctatcgagattctattagtattactgctatgggcggtttatattttcttgctagttccaattgcagttgtacatgttggaccgattaaaaattggtttttacgcttgctaactatttactttcttgatattcagtacggtgatgcacaaaatttagcaataaatccagattttcgctggcttcattcacttacctatcaaggtgtaatcgcagctattgctttattaacgatgacttgtttcttagttaaagcttggggctatcacttcaatccaaacttaaaatttattaaaagtccaagctttcagaagaagatcttgctggctttattgatcatggcaaccattgatttgttttacaatgagtttatcaactatgataaagcaatttggacagtattctttggtgttgacattggttcatttaaattctcaattcctaatttaactgcagccattgagcccggaattttggaagaaaccgaacgctatttattgatcgtaatttttttagctggttttaatagatttccaaagtatcgcatccctgttgcaatctatggttcagcaattttgtttggccttagtcatttaagtaatttttgctggcatggagaaagttttactgcaacaattgcacaagttattggcgtaatggggagcgcctttatctgggcagaattgtatctctatacaggaaaactatggttgccgatgatctatcactttttaatggattatatttctgatttgcaatctggttggaattctgctggctggtcttggaatggcgaaatcactgattatatttatactgtattaattgttggcgttccattgctattctcaattttgatgcttttcggtaaaagaaggcaagtaatggaagataatgcagatttgattttgaatctaaacggtaggcaaagcatgatttatcagtgacttatattaaagggactataatgtatatgcaagggtaaaataattaagagaggtcataaattatgaaacttaagagaattgtattaagtattgtggctggaactgcgctttttgttcctgcagctttagcgggtcaaaatcaattaacaccggtagttcgggcaagtactctgaagaataagattacaactgttaagagctataccaatccaactttgtataataagaatggtaaagagctaggtagccaagatcggataaattttaagaaaccgatcaatttttatggtcaaccaattgttattcagggacccagggtcagtgcttttattaatcttaatgggatgccacaagctattgttaatggtgaaacctatgcagatttaggtgatggtggttatgtcaacatgaaatcggttggtagctataactggaataataatgagatcggaattattaaaaacacctatatttacaatagcaagggtaatcgtttatcaacttatcgcggtggcaaggcttatttaactaaaggtagcaagattaaatatgctggtaaaagttggactacttatcctgattcatattttaatttaggtgatgggacgtatttaaagtctaataacgttaataccatgaatggcaaaggcgttttgaagctgaatgctaacactgctatttacaataagaatggtaagcgtattagctttaatggacaacaggtttttcctaaatactcaattataaattatgctggtaagcgtcgcactaagacacaaactgacgattactattacacaaacttaagtggtagtaaatcatatgcaattaagaattataagattaaaggtcaagactattattacattggcagaggtgcttatatcaaggcaatgaatgttggtcgcatcaatggcaatccggcatttcgtgatggcggtgcaactacgattgttccgcagacagatttgtacatctataattctaaattaaagaaaactaagcaatccgttaagaaaggacaaaagattagagcggttgatccagttgttctaggcagtggtgatattgcccaactattttacagaattaagggaacatctaactatgtttcctggggtgattatagtgagtatggttttgaagatgatgagcacgtgggctactttaactttcgtgttagattaaatcctgttaaaactattgaaaatgccgctacacgggccgctgaagaatcagattaattgggagtgaagacgttatccatttggatagcgtttttattagattataggaagaggataaaagttcttggtgttgatgtttatacattgctgaatagattagtggtaatactacgatttacgattgttggagagttcgatgaaataggagacagctcaatgattaatgatttactttctgaaattagaatcgatttttggcgtgacatagggttaattattaatgatgaaaagctttttgatcgggtaactgctaattatggctatcatgaaattatgtatcaaaatattgatcattttttcatagaaactaatgacgatgatttcattaaacctaagcgaaaaacaacgtttgaagaaatttatgatttctattgcctagatcaacatataaaaaatgtgatgatgatcagtctgcaattgtttgaacaaagcttcaaagtagcccttgcagaaacagctcttattgagaatggtaaaaatttcaccagaaatcttaatccacgaacaattcatcaaaggcagtttctaaatgaaaaatatcaattaaaagatgggcgagtaattcaccgcggtgatgtgaaagcgcgcatgcggcatattaagcaaaactatcttgagccatatgagggatatactgaggctcatggtgaagcagggatcggactgattattaaagaaatgtcatttggtgttgcaacgaattatttctttttaatgcccatcaaagccaaaaagattgttttaacacgtgtgtttaaagaaaagataactctccgtcaatttgaagaatggctaaatgaaattagatattttcaaagacgagctgcccataacttctcgctgttgattatcaaggaaaaacggcaatttctgtataaattagtactgaataatttgcaccagctggcaaatcaagaaccatgtgaattagctgaggaaagaatcaacaagattgttcaagattatttgacgaagtatccaattgaaaaagattttttgaataaagtttttatggagaaaaaggattaagttgaagttttttataatgatctttcttcaaacaaatgaccataggaacttaaaattctagctaaatcgatccaagtaagactaattgttttggtattatcattgggatgcacaccaactaaattgttttcttccattgctgcttgatcgacaatcaggggaattttattactttgatcattgagcaggctaaatggggaaacagcccctgttttaacttgcagtttttcttctagttcagcttcagtagcgaaggttaaactagaggagagtaattcagctttagctttttgccaatcgatttttttatcttcgggtaacattagtagataataatttttggcgttacgggttttaataaaaagagttttacatttagcaaaatcttcatcttctaagtatttatctgcctttttagttgtaaaaactgctggatgagagaatacttgatagttaatatcatgatcatctaaaagttgtaatatttcttgagtatgcatattttcctcctaataaaaaagtcaggattttcctcctgactgataactatttacgcttttgcttacctttattacggttacgtaagtcttggtgtagttctttcttagcttcagttgtagccttgctttgaccgctattggagttaaacaaagcatccactttttctttagtaacaacagtttcaattggcttatcttttaattcatcggcaatatgcttcttaacactaggtgtaaggacaaaggtaacgattacttgttggacaatcattactaagttaccagcagcccagtaaagagctaaggcaccagagaaggataaactgaagaacaaagtcataattgggttaacaatcatcattgattgcatggtcttcttttgttcttctggaataccaattagtgagatataaccttgaataacggtaaagacagtcgcaataatggctaaaacaacagatttggaacttagagaaataccaaagaatttggattgtgccaattgaggtgaatagaataccgcttgataaattccccacataattggtaactgaataattaatggcaagcagcccattccaccagttaatgaaacttggtttttagagtaaagctctctttgccaagttgataaagtcatttgttggtcaggggtgatccccttgtgtctcattgcattttgaatcaacttcatttgcggttgcagacgagccattttttcctgttgacgtacactcttgttttgctgtactaacatcaatggcatcaagattacacgtacaactaccgtaataatcacgattccccaaccagcaccattatcgccgccaatcatgtgcgcggtttgaatcatgatattttgtaaaggtcggcctaaccattggtaaacccaaccgtaaataccgctgtgcggtgcaacatgtggatcagttgttgccccacaggcacttaatacaagagtagctactgctaataaagccagtactccagcgtatcttttaatttttttcatttaaataaatcaccacttaatttctatctaaaaatgtatgtctctaatataatacatgaaaatcatgcattttttctacacctggaaccgattcttgactaatattttgaatttgggcaaatccagatgcagtaggtagtttttcaataaagcggtcgattttatcactgtctgcttgtaaatagattgtaacggtaccatctgcattatttttaacagtgccaggaatacccatcttgttagctaatgccatggttgaccaacgaaagccaacgccttgaactaagcctgaacaaattaattttcttgtttccatttttatctcccttatttaaattaagttcaactttgattttagcatgatcaaaatagattatcagttataatagattttgaatacaaaaaggagaaaaatatgcaacaaattagttcagttaataatgcaacgattaagaaattagcgaagttaaagcaaaagaaataccgcgatgatgaaggcttatatttaattgaaggctttcacttatttgaagaagcacttaaagctggtaaaaaatatcagtatatcttaggtactgaagaagcacttgatcaagcagatagtgaatatgaagttgatttaagtgggaagaatgtcgtattaattaacaaagcgattgctcgccacttaagttcgactaagaattctcaagaaatttttatggtattaaaaattgatcaaccaaaagaatttccgtttaattatggcaagtgggtgctgcttgataacttggctgatcctggtaatgtggggacgattatcagaactgctgatgctgctggttttgatggggtagttctttcaccagagagtgctgacctgtataatcctaaaacgcaacgtgccatgcaaggaagtcaattccatatcgatttgattaagcgtgatctagctaatgtgatcaccgattttcaggatgcagctattccggtttatgcatcgctgcttgatcgttctgctaagcaattgcctgatttcgaaaaagtgccacaacttgccttaattattgggaacgaggcgcatggcataagcaaaaccattgcttctttggctgatgaaaagctctatattccaattaaaggacaagctgaatcactcaatgccgctgtcgcagccgggattatgatttatcgcttcgcttagcacttgtaattagtaagcggatttactataataatgttagtaatactgaaaaatattttatataatattatttttacagggattatataattatggagggacttacgatgcaagaagttaaagaaaaaaaggatgcagctccttgtaaaccagaagattatgaattgtgctgtcactttgttggtgcttttaagattattggcaaaaagtggaatggtttaattattagttcactttgtgatacccaagatatgcgttttaaagatttagcacgaacgattgaggcatgtagtgatcgagtactcgttgaacgtttgaaggaactagaaaaagaagatatcgtcaagcgtagtgttgatcaaaataccggcatcatttcatatggtttaactaaaaaaggtgctgaacttaagccagtttttgaccaagtacataattgggctgacaaatgggcttagggtattgacattaagtaagaaaaaaagtatattacttaatgtaagttgcttatttaaaataagacaagatgaaaggagtacgaaaatggaatttttaagtataagaaatgttaatactgactgttgttcttgtgtatctaacattgcttttaatactcaagaattcagtttgcgtatgcctaaatagctttaattagaaaataaggagatttacgtcaactgaagtagcgtagatctttttttattgtttaaagagacctatgagagtgggtctcttttttgtgtgattgggggatttttaatgaattggacaattatccaacaagccttgcctgtgtttgctcggggatttgagctaacgttatggctttcactagttggcattgtgggctcaattattgtggggattattgtcagtctggtgcaatactttaaggtgcctgtattaagccaaattttgacagtatatgttgaattagctagaaatacaccgcttttaattcaacttttctttttatattatgcctttccagtaattggcttaaaaatgtccgctgaggtctgcagcatcattggcttaatctttttaggtggagcatatatggctgaaggctttaccggtggttttaatggcgtaagccctagtcagattaatagcggtaaagcattaggaatgaacaacttacaattagctcgctatgtggtttttccacaaggatttagcctaagcatgccggctttaaccgccaatattatttttttaattaaggaaacttcgattttttcagtaattgcaattccggagttaactaatacagcccttgacttgattgggatgtattaccattcaaatgaatatttattgatgctggtaattgcttatgcgattattttgattccaattattttattattaacttggcttgagaggagagtacggtatgcttcattcggggattaatgttttgtttgaaggaagtaactttgcccgtttgatggcagggctatggacctcgatttggattgcagctttgtcactagtaattggcttggctgtaggaacaatttttggtattttgagaaccttaaaaaatcgtccattgcgttttgttttgcggttgtacttagaattcttcagaattgtgccaaccgtagttttactgtatttggtttattatattttgccaagaagcttgcacgtcaattggccagctacttggatggcggtattagctttctcaatgtgggtagctgctgagtttagcgatattgttcgtggtgcattggaatcagtacccaaaacgcagcgtgaatctggcctagcactgggtctaaatcgcctgcaactgttccgttatgtcttgttgcctcaagcagttaagttagaactaccagcaacaatcaacttggctactagagtaattaagaccacttctttattaatgattatcaatatcatggaagtaatcaatgtcggtcaacaaatcattgaagcaaataatcaacaatatccagctggtgtgttttgggtatatggctttatctttatcttgtattttattttggattatcccttgtctgcatgggcaaaacgattaactgctaagaattaggtgaatgaaatgacagaagaagttttaagagtagagcatttaaataaattttatggcaagcatcaaactttgtttgatatcaactttagcttaaataaaggcgaggtattgaccttattgggaccttctggttcaggaaaaagtactttgctgagaacggtgaatgggcttgaagaatatgagggtggcgcaatttattttcacggtaaaaaaataaatcctagtccgaaggaatggcaattgttgcgccaaaagattgggatggtctttcaaagttatgacttatttcccaacttatccgtgatggaaaatattttattggcaccggtaaaagttcaaaaacgtgatgaagctgaagttaaacaagaagcagttaagttattagagcaagtcggtttagctaattatgcaaaagtatatccgcgtgaattatcagctggacaaaagcaaagaattgcgattgtgcgtgctttgattatgcatcccgaagtaatgctctttgatgagattactgcttcgcttgaccctgaaatggttcgcggcgtgctagatatcatgcaaagattatctgataacgaacatatgacgatgatcattgttacgcatgagatgaacttcgctgcgagaattgccgataaggtgctatttttagaagacggaaaaattttggaagaaacaccaggcaaagaattctttactaaacctcagactaagcgggcacaagaatttttagagagtatggatttttaggtgtgaatgatggcaaaaaagatttttaattggatcatggctgtcctctttgcggtagttgtggtaattgctggttattttggaattacgcgaccaggaattaacggcactgcttcaggcgacagatggaataatgaaaataatgtatcttcaattaaacgtcgtggctatttaagagtggctgtctttggcgatctaccgccttatggctgggttaattcacaaggtaagcgtgttggctatgacgtgcgcctagctcgcagagtggcgaaagatttgggcgtaaaacctaagtttattcaagttaatgccaataattgaattgataccttgaattctaataaggctgatattgttttggctaacttcactttgacaccagagcgtaaaagcgtggctagttggactaagccttatatgaaagtatcggttggggtgatttcccctaagtcagctccgataactagtccaaaacaattgaagggaaaaagcgtgatcgttactaaagggacgacagcagagaactattttactaaacaaaaaggcgtaaacttgcttaagtttgactctaaaactcagcagtttaacgcgattaaaaatggccgtggtgcagcttgggccgatgataattcttatctgtatgcttgggttaagcgaaatcctaagtttactgtcggcattaagacgattggacctaaccagtatatttctggtgcggtaaagaagggcaataagtccttacaaaaatggatggatcgtgaaattaccaaattgaatcgcgaaagcttttttacttacgattataataaagaattgaagccatactttggtaaggaaattaggagactgtcaagaagtttgtgtaaataatctctctcgttgattgacttttttatttatcttttaatcaaaataggattctagggtgtctcgaacttgcccaaatcctttatgaatcctgttaaagtaacggtcattgtaatccattgcctgaactccaataaaggtgtcaagcgactgctcagttggaaattctgttttaggcttggttttccgcttaagcctgttgttaaaggattcaatcatgttagttgagtaaattgaagctctaatagctggcggatagttgtaaaaggttaacagatcaggctcaacctgtctaagatctctaactacgtttttgtaggctttttcccagttttgatagaattcatgcagcacctgtacagccatttctttgtttgactgagtatgaatctgcttgaattcatccagtgcttttttcgatcgtcaacccgcattttggcactgatattacgcatgacgtgtaccaagcagcgttgaaaatgcgctttaggataggactggcagatagcctctttcatgccaactactccgtcagacaagaagagctctacctgttcaaggccgcgactcttgaagcctttgatcattccgttattaatattgcatgattttccaatagctttggttttattcatgatctttttaattggaacagttgacttaatgtcttggactggataccagattctaatttcggagtctgtttctgaaagtgagttatcaaagatttctggagcagttggcctgattagttcaattcaaaaaacatttggaccaggtatagcagctattattgttaacctctttaactatctcggtggcttcatgctagattcgatcagttttggctatttgacttatgttgttaaaggtattgagactacaaataacgagaacaatgataaaaaaaagaagagtatacagcaaaccttatcacaaggtttaaaatttgttttgaaagaacatgatatcaaatggttaattattagttttcttgctgccaatgttggctttcaagtagtaataccgatgttaactttcttattaaaagtacaaacacgtgcttcaataaatgaaattagtatattttttactatctcatcagttgctagtatactgggtaactttgtttatctacactttagtaaaaaaataaagctaggcactcaattaatagttattggattaattattactgtaggattcactattatgctggccattaaatctttattaatatttaccatgggatatgcaatagtatcatttggtagtgtatgggctcaagctaatttctttaccattattcaatctaagacacctgaccaatataaaggcatggtaactgctacttcaacgtctctgacaagaattacaggtccattaatggcaacgctaagtggtatactagtaagaatatctccttccttaatctttttcgtagctattgtatgcttagttttatctgtattaataactctgattagtggtttacagcaattagataagctagccaattaaaacgaaatcataatccatatacagattacttatgtaaccgtaaattctgatcttataggtggaacataagctaaagaaaagaagattatgagatggaatagctactagaatgttgtgttgttttataaatttaaaaataaatgcagtcttctttatatctatttgtgagagatctttataaataaaaaacaaattattttttatgaaatatttatcttcctaaaattcaaaaaatatgagatataaacagtatctttacaaaaagcttgcaagaaacaggtaaaagaaatatcatattaattaattactgagatcaagactagtagcagatattttttctgaacagagagtcttctttcaaaagctgcaagagaagatagaaagaacgctgtgaatttcatcttgggagtaggatctaatcaattccggtatttcaccgttaacgaaaacttaagtgtgggcgttgctacgtccaaactagggtggtaccgcgatgcttcgtccctattggggacggggcttttttgttttgaaaggaaagatttaatggacttatttgataagttaaaagagctccatgaagaagggcttaagcaaatcaacaaggctaaagacgaaaaaactttgaatgatgtcagagttgaacttgttggtcgtaagggcgaattaactaagattttgcactcaatgcgtgaagttgcgccagaaaatagacgtgaagttggtcaaaaggttaacgaattacgtgacttgtttaatgctcaattagatgaagctaaagaaaacattgttcatgcaatgttagttaagaagcttgaagatgaaaagattgatgttactttgccaggtcgtgaagcacatcttggttcaaagcacccaatcaacattattttagatgatcttgaaagctactttattggtatgggctatcaagtagttcaaggtccagaaattgaaactgatcactactgctttgaaatgatgaatatccctaaggatcacccagctcgtgacatgcaagctactttctacattgatgatgaagatttgcttagaagtcagacctcaggtgatcaagctagagtcctagaaaagcacgacttctcaaagggtccacttaagatggtgggaccaggtaaggtataccgccgtgatgacgatgatgcgactcactcacaccaattcatgcaaatggaaggtttggttattgacaagaacgtaactatgagtgatttaaagggtactttggaattaattgccaagcacgtttttggccaagatcgcgaaacccgtcttcgtccaagttacttcccattcactgaaccatcagttgaaatggatgtatcttgctttaactgtaatggtaaaggctgccctatttgtaagtacactggctggattgaagtattaggtgctggtatggttcaccctaatgttttggaaaatgcaggtgttgactcaagcgtttacggcggttttgccttcggtgttggtcttgatcgtttcgctattttgaaatacggtatcgatgatattcgtgacttctacaccaatgacgtacgtttcttagaacaattccgtaaggaggaaagataattaatgttagtttcatacaattggctaaaatattttcttgatttagatggtcaaaatccatacgaattagcagaagaaattactcgtagcggggttgaaattcctgaccgtattcatccaatggatggcttgaagaagttagttgtcggccgtgtccttgattgtgaaggcgttgaaggtactcacttgcacttaactcacgttgatgttggtgaaaacgaacctttgcaaattgtctgtggtgcacctaatgtagctgcaggtgaagatgtgattgttgctcttcatggcgctcgtattgctggcaatgaaaagattaagaagggcaaaatccgtggcatggaaagttacggcatgatctgtggtttacaagaaatcggctttagcgatagcgtggtaccacaagaatttgtcgatggtatttacgtattcccagcagatgccgaagttaaacctggtcaagatgtatatgaagcacttggcatggatgattacattttgaacttcgacattactcctaaccgtgctgatactttaggcatggaaggtgccgcttatgaagtcggtgctattatcgaccaaaagccaaaggttgaagaaaaggttgtcttaaaagaagatggtccagcctggacagattcactcgatgttaaagttgatgaaaagcttacacctaagttttacttacgtaagctcgagaatattaagattcaagactcaccactttggttgcagcgtcgtctttggaatgcaggcattcgtccaattaacaatgtagttgacgttactaactatatcatgctgttaactggtcaaccaatgcatgcttatgacgctaagacttttgctaacggaaagtttgaagtaagacttgctaataagggtgagaagcttactttgcttaatgaaaaagaagttgaccttgaccctaaagatatcatcattaccgatggtaaaaagccagtaatgatggctggtgtcatgggtggacttgattcagaaatcacttcagaaactacagatgtcattcttgaatcagccatctttgatccaactttagtcagaaaggcagcacttcgtcacgctaaccggaccgaagcttcaagtcgctatgaaaaaggcgttaactgggatgccactgaaaaggcaattaacatggcagcgcttttacttagaaatgacgctgacgctactgttgatgaaggtattcttaaggcaactgaccaaaagcgtgaaccagttgtggttaaaactactgcttcatacctcaataaagtattgggcactaagttatcagttgatgaaattgtaaagatttttgaccgtctttgctttaaggtagatgttgatggtgataatttagctgtccatgtaccaaatagaagatgggatatttcaatcccagccgacttagttgaagaagtaggccggctttatggctatgacaaccttgaatctactcaacctgttttgccagaaactcatggtggctactcagaaaaagaagaaatgatgcgccgcatgaaggcaattgttgaaggacaaggcttgatggaagctatttcttactccttgacttcacctgaaaaggccgttcgttacactaaggatccaaaagaattagttgaagttaaatcaccacttaactcaagccgttctgcaatgcgtgagaatttgatgactggattggtagatgctgctagttacaactttgctagaaagcaaacacaattagctttatttgaacaaggcagaacttatgaccatgatggtggtaaattcaacgagcatgaacatttagcagctatttactctggcaatacttttgcggaaaattggcaacatttaacccaaaaggtagacttctactttgttaagggacagttaaccaatttgttcaatgcaattggtattgatcctgaaaaagtggtttatgaggctaaaggcattaaggggatgcacccaactagaactgcaggaatctacattgataagcaatatgttgggatgatcggaatgattgctcacgctgtaacgattgctgataaggcacttcgtggtagcgagctttatggctacgaaattgatctcgatacaattattccaatgttaactaagggcgtaactgcagtgcctgcacctaagttcccagcaattcaacgtgacctttcacttttagttgataagccagttactaaccaagaaattgaaaacgtcattaaatctaatgctggtaagtacttaactgaacttaaggtaatcgatgtttatgctggtgctcacattgatgttggtaagaagagtattgcttacaacttaaccttcttgaacagaaaagatactttaaccgacgatgttgtcaataacgcgatggacaagattgttgctgctcttgaaaatgatcttgcgattaaagttcgttaaaggttgacattattgacgtaaattaatattattgatcagtgcaagataaagaaaattaatttctgaggagttaaaaatatgcctgaaaaatcttatccaatgactgctgaaggtaaagaaaaacttcaagcagaattaaagaacttaaaattagttaagcgtccagaagttattgaacgtatcaaggttgcacgttctttcggtgacttgtcagaaaactccgaatacgatgcagctaaggatgaacaaagtcaccttgaggatagaattgctcaagttgaagaaatgcttaagtatgcacaagttgttgatgcagaaagcgttgatcctaacgtagtttcagttggtaaaacaattacctatactgaagttggtactgatgatccagaaacttacactattgtaggtagtgatgaatcagatccattgaatggcaagatttctaacgattcaccaattgctcaagctttattgggcaaaaagaagggtgaaaccgtatcaattaccactcctggtggcaagtttgacgttgtaattaacgaagttaaagcctaataataaaaagggagggtagctatgactatcttcctttttgtttttttgaaaggattttaaaatgagaacagttggtattattggcatgggccatgttggtgcaaccgttgcctatactttatttacgcacagtatggttgacgaactgattttaattgataaaaatgaagctaaagtaaatgctgaatacaatgacttgcatgatactttggctagaaatgatagctatgttaatgtgcgaaagcaagattgggacggcttagaagatgctgacattattattaccgcttttggtgatattgcggcttcagttaagacaggcgaccgctttggtgagtttgaattaaatgcaagaaatgccaaagaagttggggcagatattaaagaatcaggctttcacggcgttttgatcaatatttctaatccatgtgatgcaattacccaaattttgcaagaaacttctggtttaaagaagaatcgcgtctttggtactggtactttccttgatactgcaagagttcaaagaataattggtgaaaaacttggtcaagatccacgtaacgtagaaggtttcgttttaggtgaacatggttcttcacaatttacagcctggtcaacggtaagagttaacaacaagattgctttccaattgtttggtgatgaagaacaagaaaagattagtgaacaatcaaataagaattcctttattgtggctaagggaaagggctatactagctatgctattgccacttgtgctactcgtttagttcaagcagtctttagcgatgctcatctatattgtcctgtttcagtttataatcctgaatacaagacttatattggttatccagctattattggtcgcgacggcattgaggaagaaattgaattaaagcttacttctgaagaaaaagaaaagttgcaagctgctgcagataagatcaaagaacacttgaagcaattgaagaaataaaaaatagtcattataaaaaaataaggcgagaattacagtcattgtagttctcgtcttatttattgcttattttagttttacatcccaagcggcaatttgcttgttgccgtagtatttcttgtaaatttgcttggtctttttggtctggtatgctttaacaatttcttgataaatctttttatttttatccttagtgcgggcgcaaataatattgatccattgctcagagtctttgttcaatggttcgacaaagatagtttgcttgtcacctagatgtgcagggccagcaaagtcattgttgacgacagcggcatcaacatcatcgatcacgcggctagtttgttcagatgcaacttctttaattttgaagtggttaggattggcagtaatatctgcaacagagaccaatactttgcctttcttcaatttgatcaacccggcatttttcaaaacaaaaagtgctctcgattcattggtgggatcgctggggaccacaattgttgctccttcaggtagtgcatttaggctatgatattttttggaatataagcgaataggtgagatataggttttaccgattgcagtaattccgccatggttggctttgttccaggcgttgaggaaagcatagtgctggaaggcattcagatcaacgtcaccggatttaagtgccttgtcaggttggtcataaccatcaaaacttttagtggttaaaataatcccatatttctgtttgacggtttgagcaacgcttttccagattgcaatgtcacctttgctggcaccaacgattcctacgctaactttggtttgaccgttgctttttggcgtccaaaagaagctgaagtaaccagctacgataatcaataagctaacaatggtgccaataataatattccgctgtcttctttttctcatttttctttctctcatatgcaaaaaaagcacccatcctcaaaggacgagtgcttcgtgttaccacctttatttgccagctatttacataactgacctcaatagctatctaacaatagcttgcattgttaacgagagcaaccccgatactagctaaatatcactagtataatcattctgaatccatcttcattaagtagtttcttttacttctcaccaaccagtaattctctgtaagaaagctagctataattactctattcatcaagattttttaattattgctattaatttatcatctcgttttaattttgtcaaataaatttttttacttagttaaaaagttagtaacggaagaaatagtgagaaaaagtttatttttgtcgattaacaaagtagtaaatgagtgagacaaccgattcagccaacatcccaccggccatccagtacattgccatcatcattttgccggtaaaagtaaagtaggcagtaatggcgtaaacaattacccaaataattttccaaaataagttattcattcctgagcacattttgaagctcctttatttttgactagcaccagaactgctgtcaacttccatgccgcaaccttcggtatccattcctggcatccacacatcttcaggtttaatgcctctttctttagcaaaggcgtcggttaatgtcttcatatccattaacttgtatgtctttgggtgtttagggtcgaatacttcgatttgagccatcattccggcatcttcgtgttcaataatgtggcagtggtacatgaagactccagtttgtgggaattctacacgcaagcggacggtttcacctggtctgacaggaatggtgtctttgtaaccatattcatttggaaatggcttttcgccatcacgtgaaacgactgtaaagtgtgtgccgtgaatatggaatgggtgcaacataccgtgttccttagagttggtattagttacgtcccagtattcagcatgactaacttgttgcttcatatcgatccgctgcattgcgaattgcttgccgtttatcttgttgtgatcatccatagttactttacgaatcggcaaatcttcagcgatttcaggaatttctggtttgaataatgtatcaggaataacactgttgtcaggtgcaaacttgtgaattctaaattcaattagtttgaaatcatcagtataaaggttaacgacatcgccatcatggtaatccttgaagtcaactacaacttgaagccgttcaccaggtgttaccaagatcttagtcattttgattggatgaggcaaaaatgaatcgtcacctgcaatttgagtcataactaggtcatcatcaaagtgcaagcgccattcacgacggttagacccacctaagaatagtaaacgaatcttttgtgttgttacatcaacataagggcgaaccgtgccgttgattaatggtgtttcaccgaagacgcccattgcatcataatcagcgcgatagtcaagttgattatctttgtggaaagtacggtcttgcaaaataactggaaactcgtcaacgccatagtttttaggaattgggagtttagcttcgttttcatctgttactactacgcccatagctaatcccatccaaacttgggcagcggtggatggacatgggtgagcatgaagccatgttaaggcagctggttgattaacagtgaattcgatttgcttttcttcacctggataaacaggggcatgacagccaccatcagtaataggaccaggaacttccatgccatgccagtgataagttgttagttctggtaaactattttttaaggtaacgtgaactcgctggccacgttttaagaccatggttttacctaacaaaggagcgttataaccccaagtcttggtcttagctccaggcaatatttggctttcgctttcaattgattcaagagtgaaccagacatcagtatcagtttccttatccagtgcaagaactggagggacagctaatggctgagcttctacaccttgagggatgcttaatttcttgtagtggaagtggtttttgtcaaaatcttcatctttgataaagtaattagtgtatatcttatctgtcatcttattaaccccattcttttgacactaacttagcatgattttttaccgtcttcaaggcgcaagaacgctgttatttaaaggcttgcatgtctattataactatgtaatgaaaaatatttttactattttgtaatcacttatacttaggcggattatgttattttacaagatttgttgccttgctaggcttgcgtgtctccggtaaactaagcatgaagaggtgactagatgtataaaattattgcgtgtgacttagatgaaacgttgttgagcgcagatacgcatgtctcagtagaaaatagagaagcgattcaaaaagcagttgctcacggtgtaaaatttgttcctgcaactggacgaggctacgtttctgtccaaaatactttaaaggaaataggattagagcaggcagctaatgaatatgtgatttcattcaatggtgccagcattacagaaaataagaataatcgcgtgctgtattttgacggcttgcctaatgaaattgcggatcggttatatcggcatggggttgaactagatattgccatgcatgtttacactcaagatatggtatatacgtatcatatcgatgatgatgaacgtgcctatatgacgggacgacaccagtttaaagagattgaagataaagacttgtcatttttggaggggcagaaaattgccaaggtgctctatgagagtcttgataataattatttgcaccggatcgccgctgaattaggaccaattacgcaagaattggatatttcgtattcgtctaatcgctatttggaatttaaccgtaaaggtgtcaataaaggcgcgggactgatgaagctggctgagcaacttagggtgccgattgaagaaacaattgccattggtgataattttaatgacctgtcaatgattcaggctgctggtgtgggtgttggtgtagctaatgtcaatcctgctatgaaagagcaatgcgattacattactcaggctgataataatcatggtgcagttgccgaggcaattgatcattttatttttaacaattgaaaaaaataaaaaaataattgacatattaaaaatacatgatattattgtttacaataaataaaaaaatgagctttgataaggaaagtaacttaagaaatgatttgcagagagtcttcggttggtggaagaagataatgatgaattaagtgaaaatcacctttgagctgaaagtgcgatattagcattttcagggtccgccctctatagcggcgacgtatcgctgattttgatagaatcagccgcacgtgcatgaggtagaatttttgtgagtattattctacgaataaataggtggtaccgcgttgaagacgccctattagatcaattgatctagtagggcgtttttttattatcataagcttgttgttaattttttgacttatgggagagataaaaatgagaaaaacattgaagcacttatttggcacgactgtagtagcacttttaggtgtaagtactttatctgcatgttcatcaagcaaatctggtgctaaagcacctaaacaagaattgacctggatgactacctcagaaatccaaactatggatccttcaaagatggtagatacaactggtagtgaacaggcatctaatgtttttgaagggctcaatagactgaataaagcgggtaaagttgtatctggtgtggctactaaaactaatcagagtaaagatggtttgacctggacttttactttaagaaagaatgctaagtggtctaatggtgatccagtgaccgctgaagattttgtttattctttaagacggacacttgatcctaagacacaatcacaacagcaaaatgagtggtcaaatgtagttaatgcagatgatgttttagctgggaaaaaagctccgtcgactttaggtgttgaagctaagggtaaatatgaattggtagttcacttgaaacatcccgtaccgtattttaaagccttgtcagttggttggaatccgcaaaataaacacgtagtcgaaaagtttggcaaaaaatatggaactgcatctaagtatatggtttacaatggtccgtttgttcaaaaaggctggactggttcaagtcttaactggaagttagaaaagaatgatcaatattgggacaaagataaagttaaattgcagacggttaattatagtgtacaaaagacgccttcaactgattacaatctgtatcaggctaacaaattagatggtgcctatcttgatgttcaggcttcaaagagactgaagggtcaatctggttatacagtctataaactagatagaactgaatacttgactttcaatgtatccaagcatccagaactagctaatgtcgattttagaagagcagtttcaatggcacttaaccgagctcaattggctaaaacagttggtggtgctaataccgtagctcgaacttttgctggaccaaatgaatatgttgatggtaagaattttgaccagtatgttgaaagcaaaaatccagctaataagtatatgaattataaccctgcaggcgctaagaaactttatgatagagcattaaaagaattgggtaagaataagttggcctttaccttaatgggtgacgatgatgacgtttctaaaaaggttttagagtttgtgcaaagccagttagaagatacctttggcaaaaaagttgatgtaactgttagaagcatgccgaagactactagagttaagaaaatgctcaatggtgatttcgaggcagtctttactggattgacttcgggctatttagatcctaattcacaattgcacacaatgatgacaggacaaagttataacttcggtaaatggtctaacaaagattttgacaagtatatgaataattcagataaggaattaaatcctactaagcgattagaagatttgtataatgcagaacgtgttttaactgatcaacaaggattgacgccattattccatgatggtcaagcttggatggttcgaccaagtgttaaaaatgtagaattcttgggtggtaatttcagctttaaggatgcatctgtaagtaataattaggagaaaaataatgactaaaacagcttttgtaaattgtaatttattcgttggtaatgaagataatctagtagataatgcttggtttgtcgttgatgatgaaacaggtaaattgaccgatcaaggtaagggaaaatgcacagcagattttgacaaacaagttgaccttaaagggaaatatgtgatgagcggtttgattaattcacatactcacatggggcttgattctgacttgaagaaaaaatttccgactactgaagcttcgactacttatgcagcactgcgggatctgcgtgaagctttacaaactggtgtgacttatgttcgtagttgtggcacatcctttgatgttgactgtaaattagtgcagatgcgcaagcagtatccttttgaaggtcctcaagtgatgccaactggaatggcaatgtcaattgtcggcggacatggtgatttcaaggtggggttaaatggagagcaaaatgctagtcatttggttaacggtccagaggacatgcgtcgggcagtgcgtgaacagtttgccaagggtgctaaaaatgttaagctgatggcaactggtggaattatgtcattaggtgatgaagttgatgatactgaactttctcttgaagaaatgaagatggcagtagaagaagctcattctaagcatatgacggtttgtgcccatgctgaggggagacgcggtattcattatgcggttgttgcaggagttgattcggtagaacatggtttttatttagatgataatgacttggctttgatgaaaaaacaaggtacatttttgtcaccaacattgactgcaggtcggacaatcgtcgttcatggaaaagatgttgtacctgagttctcataccgcaagatgtgtgcagtagttgatgacttttataatcatgttggacatgcaattaaggaaggggtgaaattggcaatgggtaccgatgcaggaacatacttcaatcgcttttctgatacaccaaatgagttggtggaattagttagagcaggagccacaaattatcaagctttaagagcaggcggcttgggtagtgctgaattgcttaaggttgatcaagaatatggttcacttgaagtgggaaaatatgcggatttcttagttttacgagagaatccattagaaaatgttgctgcagttggtcaaaaagataaacaagtttaccaacatggtttacgtaaattctaaatattttttatcacaaataaagcatcctcgtgagatttttcttgcggggatgcttgtttgtgtagttcaaattaaagtaaacattttactaaattctccagtaaaagcgaataaacataacccaaaatataaaaatagttcttgatttagtatgaattacgatgtagtatttaagccatcaaacgtattactgatgatttgaataagtggagattgaaatgtcaagttttcaagaatactactcagaattacaggaactagcagggtatttactacacaatccagaattaggctataaggagtataaaacttctaaggcagtggaagcagaaattgctaagatttctactaatataaaaatcgaacattattgtaaaacaggacttaaggtaatgtttgataatcattgcccaaaaactattgggattattgcagaattggattcactttatcagccaggtcataaggatgctgaccctgaaacaggagcggcgcaagcttgtggtcactatactcaggtgacaacagccttggctttgataaatgaactgatgaaaaatgatcgtctcaacgagtttggcactaatttggcttttatttttactccagccgaagaatttgtagatcttaattggcgcaaaaagcataagttagctggtgattttacttactttggaggtaagcaggaagccatcaaacttggcgtatttgacgatattgattattgtgtatcagttcatgctataggtgaagattttgagcgtaggactattgaaattaattgtgatttagctggatttaattttcaatactttgacttctttggtaaggcgagtcatgcagcatttgctcctgaagagggggtaaatgcacagagtatagccaccctatttaccactgctttggccttcaaacgtcaacaattaaaaaatccaaatcaaattaggtttaatccagtgatgataggtgataatacagaatcgattaatgtaattcccgatcatgttagcatggggacagatatacgatactttgatgtcgaatatgcacagcaactaatgaagcaattcaatcaagcagcagaaggatgctccctagctttaggcggtaattttaagtcagaaacacaggttggctatttgactttaaggtcgaatagagacatgaatgctttagtaaaaaatgtatttttaaggaatgacaagatttcagaattgattgaaaaccgaggctataccatggcagctggtgatattggtgatgtaagttatctaatgccaactattcagattggatatggtggttggaatggaaccattcatggctctgattttaaattagttgatccagtttttgtactggacatattcccggaatttatctttaacagtgttttagaaatatcaaataatcttaataaaatcaggacttatcgtagaacaaatcaggaatatcttgaacaattaaataaaatgggagcagaaaaatgaaatctttaaaaaattatggtccattaattattttagtgctattgattgacactattgcggaatttatagggatgcaggttttcaaaattggtaaaattgaagtttcaattctaccattagtattcgcagttattttagcgattattatttatttacttccattaaagccgattaagcaactctacaatgataaaagagtaaagtttgctggaaaatatatgattttaataatgttgccactaatggcacgttatggagcaaatgttgcacctaagattaatgaaattttatcagtaggttgggtatttctcattcatgagttaggtaatttaggtacaattttatttggactaccagtagctttattactaggattaagacaagaggccattggctcaacattgggattaggcagagaaggagaactagcctatattagtgaaaaatatacacttgattcaccgaaaggtcgaggagtcctaggtatttacttaattggaacaatttttggttcgattgtcttctcaattttagcaccagttcttttggggatgggctttagttatcaagctgttgcgatgagttctggagtaggatcaagttctatgatgactgcagcttcttcagctttagcagctctggttcctaaacatagtgagacgattctatcatttgcggcagcaagtcagttgttaactagttttattggaacttatattatgtatttcctcgcagttcctttgcaaagattcatgtatgttcacttgactagtttgcttgataaaaagaaagaagtatacccagaacatgattagagaaaataatttttataaattaggtagagatgcattaattttattgcttagtgttagtttagttttatttgttcagtagattaagttagtaaaaaatcctaagagcaccccaattacacctgatacttttgccggcctaggtctattatggctgttttctctgattggcattattatcagtatgttaatgaaacgagttccgtggaagattgttagaggatttcccattctaggctgggtgtctatcgtttcattagttttctgtttgcttagtccatattgtgttcgtgtaattaatgcagtagattttttatcattaactacatcggtattagcctttgccggaatttcagtaactcatagattgaaggatttatcaaagatttcatggaagatcttaattgtggcattatttgtctttttcggtatgtatttcatggatactttgatttctcaaatagctcttaatttgagtggaaaatagaaaaaatatataagtgtctgggaaaaaactaagtctcagatcatgaaaaaagaacgttgaatttttgtttcaacgctctttttgtatacttttagctccagccttgatattattaaatcatcacaaaataaaaacaaaaaggtggaaactaacatgtacaagaattatatcacaggtcaaactgctttaacacttaatctagattttgccattccggccaatcatttggctaatgtcatcagctggtttgtagattcaattccagaagatgttttagtaggcaagactgctaaaacgggccgcccagcctatcatccagccatgatgctcaaaatactgctttttgcttactccagaagagttttttctggcagaaagattgagttgatgctggaagaaaatctgccaatgatgatcttggctgaccagcaaaagatttcatatcatactatcaataattttagatcaagcagccatgccaatgaactgattaaaaagagctttatctacttcactaacctgttagaagatgaaggcttaatcaatgaaggtgctgcttttatcgatggtactaagattgaagctgatgctaaccgctatacatttgtctggcgcaaagcggttgaaaagtatcatgaaaagctgaaaggccaggcagttgaactttatgatgaattgattactaaagaagtagtcaaagaaatggaaaaagaaaaagttcaaactagtcaggggctaaaggaattagctcaagaaactgaagcagaaattaacaagctgactaaagagattgagcaggaaaacaaagccattcctggcggttcacctcgaaaagccaagcgacgtggactaaaaaagattctgcaccggctaagaaaagattatgtgccaagaatgcaaaaatatgaagaagccgaagagatctttgccggacgcaacagttattccaaaacagatcatgacgccacctttatgcatatgaaggaagaccacatgaaaaatggtcaattaaagcctggctacaatattcaagcagtcacgaccgatcaatatgtagttgattatgccatctttcctaatccgacagatttcaaaactttggagccggttttggatcaaatgaccgtgttggacaagtttgacaaaatcgtcgccgatgctggctatggcagtgaatacaattattcgatgctggaggaaaaatatccagacaagaagtactttattccctacactatgtatgaaaaagaacagaccaaaaagtataagaatgatccaactaagctaatcaactggtactacaatgaaaaagatgattattacattgatcatcatggcgtcagattcaatttcaaatattacagccagcgtaaggatcgttctactggtcaggtccgtgattttaaggtttatgaggcagacgagttccagctaacgccagaattggaacaattggctaaaacagctagcggccgccagcgccaagttcgctataatcctaactggcaatatttaaaagaaaaagcaaaagaagttctccaaagcgaagaaggcagacacatctatggcatgagaaaatatgatgtagagccagttttcggacatttgaagaacgtatttggcatgcgcagaacgcacctgcgaggtaaagagaaggtcgaaaccgatatcggaattgcctttatgatgatgaatttgaacaaatattgtcaaagaaggtggctgaagggccgatttttattgttaaaaattttaaagagaacaaaaaaacgatcaagattcttaaaaaaggaaatcttgatcgtttttattcatctggaagctagttttttcccagacacttttgaagtgtgtcgggcatgacattcatctagtccaatgaaagcttggcgtaccgcaaggtggaccgctctcgccaatcctatccaatatctatttagataaaatggacaaggaattggaacaaagaggcttgcgctttgttcgctatgtcgatgactgcaatatcttcgtcaagagtggtaagtcggctaagcgcgtgatgaagtcaattacatcatggctagaaagaaaactgttcttaaaagttaacactactaaaactaaagtagttagaccaacgaagagcaatttcctaggctttaccttctggaaaacgggcgaaaactggcaagcaaagccgggagacgaccgtaaagccaagctttatgacaagattagagaattgttgagtcgccataaagcagttgctcaacctctatcattagtctttactaagataaatcaagtggtcaaaggctggggtgcaggcgtttttggctttaacgcaaaagaagtcgcaaaaatgtggcaggaggcctttgatactccgacaagcatctccactgtgatttacgctgttattcctggcagaaagaataaagacgtggtagctgattttaaggatatttttgcttaaatagaaattttctctcaaataacaatccaaacaaaaaagacgagccaatgcccgtctttttattttcttgaaataaatttttagttaaaagttagcttttttaacgtaagtgttcttagaaatacgatagaaagtcttgccgtgtaatttaattgcgcgaccataagtgttaacgcggtgacctttcttcaaaactttcttattagcacgcttgccgttcttcttgtagacataagcattgtgcttcagagtccgcttaacggccttagctttcttggcagctgtctttttagcagcagcggcatcagtttgagtcttgtcagatgtagtattggcatctttattagcagtgtcttcagcgaccttacctaaagtaatatcagccttttcgttcatggtcttgcccataacgttaagaccgaattctaagctgccagcgccttctttataagcatctgctgagaaaacatagtcaagggatgagccgtctttagcaacattttcttgcttgccggctacaccattcaatgttaggctagcaaccatcttagacatgtcttgacctttggtcattggtgctttagagccatcaacgtgaataattacttcggtaactttaccgtctttaacattaacttgagcagagttgcccaagaacatagcagcttctgatggggtagtgctgccagttttggtaatagtcatagtgatagtttgcaagtcgctgttttgactagtagcagtagttgcagcaacattagtagcaggttgatcagctgcagacactacagctgatggtgccaaaacactagcgcttgcgagtaaagcaagtgatgttaaaatgattttagtattttttctcataaaagttttctcccacgaattttagatatcgcttacattataatcaaataaatgttataaatcaatatattttttgttattttatttttttatgagcataataaactgaataaaatatgaaactgtcaaatcttttgtgtaaatagatctttctcgtaaattgattttttaattatttatttaatcaaagtaggattctaaggtgtcctgaacctgaccaaagcctttatgaattcgattgaaataacggtcattgtagctcattgcctgaatgccaataaaagcatcaagcgactgttcagttggaaactctgccttaggcttagctttgcgcttgatcacattgttaaatgattcaatcatgttagtcgaataaattgaagctctgatctgcttgggatagttataaaagaccagcagatctggttctatgtctttcaagcttctgataacatggctgtaaaccttgccccatttggtatagaagtcatgcaggacagctgtggcttcttctttgtttgtctgttgatgcacctgtttgaattcgttcatgatcttttcacgatcgtcgacgcgtactttagcgcagatattgcgcatgacatgaaccaaacagcgttgaaaatgagctttaggataagtcctggccaaggctgttttcatgccaacaacaccatcagaaagaaaaagctcaacttgctttaagcctcgggatttcatgttttgaagcatatctgtccagacttcaatgttctcgctaggtgcaatgcagtagtcaatgacctccttgtgcccattaggcttgatgccaatggcaatatagactgcttcacgctcaaatgtttctcggcgcaaaggaaggtatgtcgcatccaaatagacgcagaaaaacttgtcgcttagcttgcgtttgtggtaagcctcaacctttggaatcatctgcttggaaatatttgatacctgagctggactgtaatggctgccatacatcttttcaattagatcggctatttccctggtggtcacgcccttggagtaaagcttgataatcatgctttccaagatatccgagtgctgcttgtagccaggcagcgtgtgctgatgaaattgaccgttgcgatcccgaggcacttgcacttcaattgggccaaattgcgtatcaactttgcggaaataagcaccatttctagagttgccagtattccagccatttctggcatagggatcatagcccagaaaggcagtcaattcagcttctaacaagttattaacagcctgttgtagctctttgcgcaataaatcatttattttgtctggattgaatagagcttgagcaaaatctttggtaaaatcattcatgaaggagttcttctttctgtatgtgtttttttgttcaaaccaatcatacgagaaaggaactcctttttctaatgtttaaagaaataaatttaaggaatcattcatccttacacaaactattttacagtctcaatttgtaaggctttctcttaaacattattctgaaatagttttatactaaaactagatctgagtgtttaataaagtagagaggtcagaataatgagtaaacaagagaagacagatcttgaaaaagatgatattcaagatgtggtaaaaaagttaaaagttgatccacaaaaagggttgacttctcaagaggctcaggctcgcttgcaaaagtacggaccgaatgccattactgctaagcaggaaccaatggggctaaagtttttgaagactttactggtccaattgcttatatgattgaagcagctgcaattatttctgcaattattggccactgggatgactttttcattattattgtattgctgttgttcaatgcctgtattgaattttggcaatctcgtaaagcgtcaaatgcgttagcagcgttgaagaagggcttagctccaactgctacagttttacgtgatggtaaatttgaaacgattgatgcaagcaaattagttccaggcgatattgttaaaattcggctagggcaaatcgtaccagcagatttgcgcttgggactacgcttcaattgatcaagctgccttaactggtgaaagtttgccagtaactaaaaaagttggtgatgaggcctactctggcagtattgttaaaaaaggtgagatgaccggtgttgttattgcaactggctctaatactttctttggtaaaactgctaaattagttgcttcagctggtggtaaaagtcctgctcaagaagcaatgtttaagattggtaatttcttaattatcgttgccgtagttttagcggtaattatggttgcttctattcctgtcgcaatgccaactgtcttttcaattacgttggctttaggtgcgttgaacctatctaagaaaaaggcgattgtttctagactagcttcaattgaagaaatggctggggtagacatcttatgtagtgataagactggtactttaaccaaaaatcaattaaccttgggtgatacaactttaattaacgctaaagatgctcaagatgtaattaaaattggcgccttagcttcaaggaaagaagataatgatccaattgacaacgcagttattaaagctttgaaagatcagagtgttttagctgattggacaatggaaaagtttattccatttgatccagtatctaagcgaattgaagctcatttaattaataataatactaaagaagaattatgggctattaagggtgctccccaggttgtagctaaattaagtagtgatccagatgtccaaaagaaagttctagataccactgatgctttagcaaaaagagggtatcgtgccttaggtgtagctgaaagtaaggatcaaggcaagacttggacaattcttggtgtattgtcgatgttcgatccacctcgggacgattctaagaaaacaattgatgattgtaagcgtgaaggtatcagtgtcaagatgattactggtgatgacaccgcgattgcgattgaaactgctaaaaagttaggcatgggtactaatatttataacgctactaaagtttttcctaagaatcttgatcctgatcatgttccagccgatttggaaaagttgattgcgcaagctgatggttttgccagagttttcccagaacataaatatgcgattgttaaaactttgcaaaagcaaggtcatattgtagcgatgactggtgatggggtcaacgatgcacctgctttgaagcaagctgattgtggtacagcggttgctggagctactgatgctgctagaagtgctgctgccttaattttaacttcacccggtttgtcagttattcaaactgcaatcacagaggcaagaaagatttttgccagaattacaagttacacaatttatcgtgttgctttgacaatgaacattatgttcttggtagttttgtcatcaattttattgaacttccagccattaacagcaattatgatcgtggttatgtcattacttgatgatttaccaatcatgactattgcttatgacaatacctatgtttctaagaagccaatcagatggcagatgaagaagattcttacaacttcatcaattttgggtgtatttgctgtaatccaatcaatgttgcttctatttataggatatatgtcagttaaaaatcctggctcaattagcattttccaagttggaaacctttcacaattgcagacaattatgttcttgcaattagttgctggtgggcacttactattgtttgttactcgtcaaactcgttggttcttcgaaagaccatttccagctccaatacttttctgggcaattgtaattacacaaatttttgctgcatgtgcatgctacttgggctggtttgtaccaaggatttcactatggatgatctgtgagatttggatttataacattgcttggatgtttatattaaatattattcggatgatcatagaaaaagttcaaaaataagtagatacataaaagataaaaagcatggcttcggtcatgctttttgtttggtaaaaattatgcataatgtttgaaggcacttacaacgggtgttattataatggcgaaaagagaaacggtatttttcacataagggtgattcaaatgttagataaaaataaatttgatcaaaaacaaacgtattcgattagaaaattaactattggaactgcttcagttttaattggattgacttttttgggttttagtggaagtcaagtacatgctgctgagactactgctaatcagccagaaaagtcagaacaagttctaactgttgaatctaaacagcaatctactcaaaatagttcatctgttgaaaaggttgaaagaaatggtgatcaatatcaaaataaaattaagacagaaatatcagctgcgtatcagaaattagactctgaggataaaactgatcaagcaattattctcggtgaaaataatacaactagtggactaaaaacaaatggacaaggtaaaaatgctaatataactaacgtgccggctgacggctcaattaagtatgattattctattaccgctaagaacaagaacacgaatcagactcaagtagtttcaagtgcagaagcaggtaagaataataatgccattttaattgagcaaaatgctcaagaccctgaggctcacttaactctagaaaatgtttctaaaactgatcaaatgattggtaatagtaaaaatgactctaaccctaatcctaatgatgaagcagttttaatgatcaatgcatggtattccaataaggaaaaactaagtttgcaaatcagtagtactaaggcagcaaatgtagtctttattaaaaatggtaaggtgattaatgataatgctttgtcagtttattacttggcccaaaatggtacttggtattcttatgaagaaatgatgaaaaactttggcgctgccgcaattagtaacgtaagacagattgggttcagaggagttattcctggtgaaactactgcgcaaatgaatgtacccttgatcattgatccaacaggaaatcaattcaatgaaatagatctaaaagctcaaaacgaccagagtatttatgtacgcacatataaacaacccaaaaagctttggacagttgatgaagctcagaatactccaattagtttggtaactaggaatcaagatggtagttatgatgctgtcaatataccacaacttattgagagtttaccaaaagttggtgaagttattcagattactaattctggtaatatattggacacaagtggaaaagctttttatgagggtggtagctataagattcaattatcaaagattcaacagataattgataaatatggctattcagtgaatccgcaggcaagagatttaaccactttaatgccattttatagttatgatacaaataccagtcataaggtaattattcatggacttaataaagaagatcagaataagagaattttctatgttgaagtacattaaattatcgctactaaagatgagactttaaaccaaggatctaaagaagcgcaagactggaattatcatcaaggtgtaactggagtatttaatgtaagaaatcctaatgctgtctataatggatacttattagaaaatattccagttaatgcacaagatgttcaattggttggcatcatcgatgaaaaaggaaataagactgaaacttgaaagctaagattaacgctccttccccgcgcctcttggctttttcttatcaaaaataaaaacgcaggctctctctgcgttatactttaagtgtcgacctaaaaagtaaaggagatcctgcgcaatgaacagtatagaacaaatcgacacagaaaatgatactaaatccttaatttcttcatttattaatctaattggtctagctaagttaactaaacaagtcaattttaagcgtaaatccaccgtttcattaaccatgattatctcttggctgatgtcagtacattttgctcggctttctttattcagagctaaggatgacaaacgtttttccgttagaactgctcgcaatgtacttaacgatggaagaatcaactggcaaaaactattatgcttgattgcagcccggctcattggctgcttaaaaccatttatcgataaaagacgccgacttgcttttatcgttgacgatacgctgatggctcggtctttttctaaaaagaccgaattgctagctaaagtctatgaccatgacaagcatgagtatttgaacggatatcgtggtttaactttaggctggagcgatggcaataccttcttgccggttaactttgccttgatgtcaaccaaaaccaagaaaaatatgattggagctgctcccattactgctgatgaacgttcaatttctggtaaaaggagaaatcaagctcagagaaagatgaatgatgtaactgtagagttgattagacaagccttacgattaggagtagaagctaaatacgtcttattcgattcttggttttcttctccaagaatgttttggattttaaagaagatcggtttagatggacttggcatgatcaagaagagttcaaagatttattacatttatcgccatcgccgctatagcgttaaagacttgtatgatcgtttggctgcttcaaacatccgtaaaaagaaacattatctttattcaagcatagttgaggctcaatatcatggacatagctttttattaaagctcgtctttgtctccaaccgtggaaacaagaacaagcatttggttttagctactactcagacaaagcttagccctgaagaaatcatccaactttatggtcgtagatggcaaattgaaacatattttaagacgtctaagcaatatcttgctttagataaatctcaagttcaaagctatgatggccaatgtggctatatcgcagttacagcaataacttatgatctattgacctggcaggaaagacaaaatacagatgataagacaatcggagatttattctatctaatgaacgaatccttacctgatattagattcgtagatgcattggtctacttaatttcagaattaaaagagcttaaacagaatagttttgaaaagatagatgaagtaatcaatgactttattaaccaactgccacgattcatacaaattgcactgaaacagatcatataaaaactaattacgtctaagaaagctcaatagtgacaggacttgagcttgattttggtgctttcaattttcagaaataagattaataaaattaatggtcaaactccagccggtaaatatattgtgacagtttcctatagattaaatggttctaaagaatcagatatgaagattgaaaatagctatgttgtagacatccttccagtaaaagcaccacagcctgatacacctgatgtaccagaaactccgactcaaccgacaactccaactcagccaactgcaccatcagaaaataatgtggctccacatcctgaaacgatagacaagcaagaaaaaaatattccaccaaaagctgagcgggtaaataagacaaagaaaacgagtaaaataaataaagtagcaaagaataagactgttgctccaaagagtgaaaaagtgtcatcatgtcaatttactaagaaagaaataccagttaagttagccaattctaaggtaagtgcggtatctgttaaagaagttaaacttcaaaaagcagttacacaaaggaatgttttgccacaaactggtgaaaaacaaactgggttgacggctattggggctgtgtttgccgcaatcgcaggaatattcagtcttgcagcttttagaaagagaaactgattaatttaatattcaaaaagcaatagagtcttcagtgaagactctatttttgttgtgtgtcgggcatggcatttgtctagtctagtgaaagtctagatcacgggtagttgtcgccaagtgtagcgaaccacaagccgttagcggtgacgctatgggtgaaggaagtggctagcgagttttccgagcctacgtacagaaacctggtcaggccaaatggtggatgagactgcagcacaagttaaagtccaaaggacaaccgtaaaaccaagacggtaaaccagggggcagtggaaaattaaagatgaatgtcttaccccgagagatctcgtggacaggtgaaaccgagtaagctttaatatcagcgatcgtaagcctggtcgaaaaaggttaatcgcgagaagtcagctgaggtcgtagtagtgctgaaggttttgtaatgaaactggagcgaagggcctaatgtttgtaagagcatatctcgctataagcaatgttcagacagtccggataagaggatagcctagcacaaagagaacgtaactctttgatggtgaaagcaattgggacaattctgaataaatttacaagtagaaatggagatatcacgagatggaactaattgaacagattttaagtcaaaataatctcaaggaagcaatcaggagagtcaaaatcaataagggagcgcctggtgtagacaggagaacagttgatgagcttgatagctattttaaaaagcatcaagtagaaataaaggacgccatcatgaagatgaagtatcgtccgcaagctgttcgcagagtctacattcctaaagctaatggtaagaaacgtcctttaggaatacccacggttgttgaccgagtaatccagcaggctattgcccaagtattaatgaagatctatgatcctcattttagtgagcatagctatggctttagacccggacgcagtgctcatgacgctattgaacaagtcttggaatatttaaacgaaggctatcaatgggttgttgacctggatattgagaaatactttgacacggtaaatcatgataaattaatttcaataattagagagcaagtaaatgacaaaaccaccctccatttaattcgagcctttcttaaagctggagtaatggaagatggttgggttaagcctaataaactaggtgtaccacaaggcggccctctttcaccaattctatccaatatctatttagataaaatggataaagaattggaacaaagaggcctgcgctttgtccgctatgccgatgactgcaatatctttgtcaaaagcggtaaatcagccaaacgtgtgatgaattcaatttcatcatggctagaaagaaagctattcctaaaggtcaacgcaaccaaaaccaaagttgtacgaccaaccaagagcaactttcttggctttaccttctggaaaagtggcgaatactggcaagcaaagccaggagatgaccgcaaaatcaagctttatgacaagatgagagaacttctctgtcgcagaaaagcagctgctcagcctctatcactagtctttactaagataaatcaagtagttagaggctgggtcaattactttagagttggcgacatgaaatattttctaattaagttcagtcaatggctgcgtcataaagtacgggtggtaatcattaaacaatggaaactaccaaaacgaatatacattaacttaatgcggattaacaaggcactaaagtgcaattttagtgatgaagatattcataaagtagctaatacgcgcttaggttggtataaaagaagtacgggtcatgtcattaactttctgcttagcccaaaagtattgggcataagcaaagcggatcgcccaggcttggtcgatccgctagaatattatttatctcgtaaataatcacaaacgtagcgccggatacggaaccgtacgtccggtgcaatgagaggggcgagttataaaactccctctactctatttttgctttagctcttttttgttaagtatagcaattaagattaccgaagggtttaaatcatgaatcaatttattggtcgcaaaactgaattaagaaatctcgaaccgtcatatttctctttaatctcggtaagtgatacattaaaagcaaccaaagaaatctaacagattggaggaaatactgatggatgagttcgatcaaaatccaggtcgtcgtcatgtagttgatgcatctggtttaaatgtctttttaagtaaaatttatggctatatggcactggctgtctttgtttctgccttgagtgcctatcttacgatgactgtttttgctaggcagatggttgccttaatggttagtcatccgtggacgatgtggctgctattattgttaccaatcgcattaacctttgtcattaactttagagcaactcgaactccagtagccagctttattttattgataattacggcaattatttatggaattacttttgcctttattgcaggcgcttatacagggcaagatattgcttcggccttcgttgcttcggctagcgtattcgtggcaatggcaattatcgggacggtaactaaaaaggacttgagtagatggggttcgtatgcttcagctgcattaattggtttgattgtggcgatgttagttaatttgttcttaaagaacccaatggttagttacattttctcgtttattgcagtgattatttttacagttttaaccgcttgggatgcacaaagaatgaagaatatttacttacaatttggtggagaagtttcaaccaatggcttagcagttctgggtgccttgtagttatatctagattttgtcaacctgttcttacagttcctaactatttttggttataacgatgatcagaactaggtaattcaaaagcgtagtactagttaaatattcttggactattaaggagcatattcaatattacaaaaagtgtctgggaaaaaactagcttccagatgaataaaaacgatcaagatttccttttttaagaatcttgatcgtttttttgttctctttaaaatttttaacaataaaaatcggcccttcagccaccttctttgacaatatttgttcaaattcatcatcataaaggcaattccgatatcggtttcgaccttctctttacctcgcaggtgcgttctgcgcatgccaaatacgttcttcaaatgtccgaaaactggctctacatcatattttctcatgccatagatgtgtctgccttcttcgctttggagaacttcttttgctttttcttttaaatattgccagttaggattatagcgaacttggcgctggcggccgctagctgttttagccaattgttccaattctggcgttagctggaactcgtctgcctcataaaccttaaaatcacggacctgaccagtagaacgatccttacgctggctgtaatatttgaaattgaatctgacgccatgatgatcaatgtaataatcatctttttcattgtagtaccagttgattagcttagttggatcattcttatactttttggtctgttctttttcatacatagtgtagggaataaagtacttcttgtctggatatttttcctccagcatcgaataattgtattcactgccatagccagcatcggcgacgattttgtcaaacttgtccaacacggtcatttgatccaaaaccggctccaaagttttgaaatctgtcggattaggaaagatggcataatcaactacatattgatcggtcgtgactgcttgaatattgtagccaggctttaattgaccatttttcatgtggtcttccttcatatgcataaaggtggcgtcatgatctgttttggaataactgttgcgtccggcaaagatctcttcggcttcttcatatttttgcattcttggcacataatcttttcttagccggtgcagaatcttttttagtccacgtcgcttggcttttcgaggtgaaccgccaggaatggctttgttttcctgctcaatctctttagtcagcttgttaatttctgcttcagtttcttgagctaattcctttagcccctgactagtttgaactttttctttttccatttctttgactacttctttagtaatcaattcatcataaagttcaactgcctggcctttcagcttttcatgatacttttcaaccgctttgcgccagacaaatgtatagcggttagcatcagcttcaatcttagtaccatcgataaaagcagcaccttcattgattaagccttcatcttctaacaggttagtgaagtagataaagctctttttaatcagttcattggcatggctgcttgatctaaaattattgatagtatgatatgaaatcttttgctggtcagccaagatcatcattggcagattttcttccagcatcaactcaatctttctgccagaaaaaactcttctggagtaagcaaaaagcagtattttgagcatcatggctggatgataggctgggcggcccgttttagcagtcttgcctactaaaacatcttctggaattgaatctacaaaccagctgatgacattagccaaatgattggccggaatggcaaaatctagattaagtgttaaagcagtttgacctgtgatataattcttgtacatgttagtttccaccttttttattttgtgatgatttaataatatcaaggctggagctaaaagtatacaaaaagagcgttgaaacaaaaattcaacgttcttttttcatgatctgagacttagttttttcccagacatttttgatttactttatttgtttatttagcgaaatcatttctaatagactctgagcagtagaggaaccttcattgccagcttttaagccggatcgttgcaaggcttgatcaatattctcagtggttaaaataccaaaagttattgggacttctgctttaagattcatctgcataattgcgtttgtaacattctgaataatcatgctgtaatgatcagtctcacctttaatgacagcgcctaaagtcataataccatcgtagttatttgaattgagaagcttattagcagtaaaaccaatttcaaaagcacctgggacccaatagatatcgatctgatcttcaagtactccaaattgctttaaagtagcaatagcaccgtcaactaaatgatgggtaacggtttcgttaaacttggatgctacaattgcaacgtgataattattgtttttaaaatttccttcataaatattcatttctgtgttcctcactatagtgcttctaataaatgatggaatttatctcgtttagtttctaaatagtcatgatttaccttattagcaggaatttccaagggaattcttttttcaatagtaataccgttattttctagttgatcaattttatcaggattattagtaagcaaattgatatgactaatacctagatcttttaaaatcttggcagcaataatataatttcgttcatctggcttaaaacctaaaatttcatttgcttcataagtgtcataaccttggtcctgtaaaccataagcttttaatttgttaattaatccaattccacgtccttcttgtcgtaaataaagaattatgccactaccatttttattcatttgcttcatggcagtatgtaattgatcaccgcaatcgcagcgcattgagccaaacgtatcaccagtaaggcattctgaatgaagacgtactaaaactggctttttaggatcaatctttcctttaataatagctaagttttcattggcgaaagccttaattttgaaattgccatatttagtgggaaaatttacaaactctgagcgtttactcacaggactattaatatattcttgtagttctgcaattgttaaaaatggtaagtgatattctttagcaatttctttcagttggggacgacgagccatatggccatcagctttcataacttcacaaatatatgcaacttctggttcgccagcaagatgagctaaggcaatagaagcttctgtgtgaccattacgattcttgatttgatcatctttagcgactaatggaaaacagtgacctggtctaaagaagtcttctggcttggaagtaggatcagcaattgccttgatagttgccgcacgatcataagcagaaataccagtagtggtggttttgtaatcaacactgattgtaaaagctgtaccatatggatcagtattattttgttccatttggtagaaatttaaacgttgggcaattgttttgcttacaggggtgcaaagtaagccacgagcatgtttggtcataaagttaacattttcaggagtaactttagaccctaagccgatcatatcaccttcagattcacgatcttcatcatcagcaacaatcactaaaccaccatttttcatccattgaattgcattttgaattttttttacgtccattttaaattctcttttctaaatttttagcgacatatttacttaagatatcagtctcaatatttacttctgagccgacatttaacttacttaaatttgtttcatcttgtgtatgaggaattaatccaactgagaaaacattatcatgtgtatccattactgttagcgatacgccattaattgcaatactaccttgtgctacaatctgattttttaagcgagtaggaaaggcaaaccaaacttcaatagcattttcgttagtcctgatttccgtaactttggcaatatcatcaatatgtccagtaactagatgaccttctaatctttgtccgacctgtagtgaacgttcaacatttaattgggcattgatatccaaattcttaaaagtagttttctgataagtttgtggcatcatcgttactacaaaagaagtatcagtgtattgctcaacagttaaacaggttccattaactgcaattgaatcgccaatttgcaagtttttagtaaagtcgggctggcaagcaacagtcataacaatagtttcatcgtttttatcaatagcagcaattcgtgcgtcgccgcgtactagaccactaaacattaatttcaccttcaattctaaaattatcatccaacttttcagcacgtaaattatgtaaagttgttttggagctgggtgaaattcctagctttcctttttgaccaagtaaaattggacttatgtaagtaattaaattgtttacttgaccttcggctagcaaggcattagctagggtaggaccaccttcaacataaaccgactggatctcttcattggtcagtttttttatgacttcggtgattgaagcgtttttcatcaaaaaaattgagatattttcattatgtggagtcttagctaagcttgtattttgagtaaaaatccaagttggacttaacttatccgttaataacttaatatttaaatgattcagtaatctaccacgtcgatctactattattcgaatgggtggaaaatccgtagtgacagtagtcagtaaactaggattatcgataatggcagtatttgatccaatcatgatggcttgataatttgcgcgctctctatgtactcgctgataaacagtttcatttgttatttgagtgcgaatatttttagcctcattaattcgataatctaagctgaccgcctgtttcaacgttatccatggatgattatgttggtagaagtaagtataaaacttgtttagcttctttgcttgatcttctaatacgccaaccgttacttgaatattgtgttgccttaacttggcaatacctttacccgttactagttgatgtggatctacttgcgcaattaccactcgtttaattttgctagagacaattaaatcagagcagggtggctgcttaccataatgactgcatggttctagagtaacgtatagggttgaattaaataattgttctggagttagttttgaaatagcatcacgctcagcatgataataaccataacgaatatgatgacctgtagccaagatattgccatctttaacgatgacagctccaaccatggggttcttccatgtttgatagagtccttttttcgcttcttggatagctaattgcatatatgcttcatcactgttttccatttctttcacttcctaacagaacaaaaaaagaacctcgaagaattacctcgaggttctaactaacattcaaaaaataatttaagtacagttcctactatcaaaatagaaaagagcacagcaaaattattcttcttccatctagactctaactatcggtaccattaaaggattcaaccgcttatgcgggttgcggactttaccgccggtcgggaatttcaccctgcctcgaagaacattatttaattcattcttagaataaaaccgctttctaaatttgtcaataacttttttaattagaaaaattccaaaggtgataaaatacgctaaatctttttgaaattccttttagtgattattgagggttctataataaaatgaattaacaaaagcaactaatgaacacgagagtgataaaatgaataccaacaaattaactgaattacttaataagatgaatgagtatcgtcccttagatcaagcacaggtaaaggctctagaacaagtcaaaaaagagacaaatttataggatacgcgtggtgctagttaaatcgttttagttaataaaaaagtccaattagactagactcaagttgtaagtaatttaaatagaaaagagtctgatctaattgaactatctcaagcttaatcgtttttctcaccatttacaagttagttttaatcggttaaatgtgatttgtcgctcgctgtataagctttatgcgcctgatggacttaaacatcgtaaaaatgttgatcagaccaagcttcctgatagttctatcttagcgatgctcatttggcaaactgaaattggaattgaatctcaacgaagattctgtaaattcttcgttggcttatctcattctcgttttaaccgtcgagctcgaatgctcttgcctctaattcgttgtatccgtcagggttggaatcaggaagtaaagacagctggagaatttttgattattgatagtttcccagtgccagtttgccagcctgttcgcaattatcacgttaagatcttccgtggcatagccgatattggttataaagcgacgaaaaaaatctactattatggcttcaaagtccacgcaatagtgagtgatgatggctatctgcttgactacgcagttactaaggcgtcggtacatgatgcaaaagagacggtagaattgatgatcaatgctcatccaattaaccattatcttttaggagatgaaggctatttaggaaaagacttagcagccaagctaaagcgtatgggatacgtgctttggacgccatatcgtaaaaatatgcaaggagctagaaggcataatgatcatcaattgatggcaattagaagaagcattgaaagcgacttttctttgcttagttattacaacgctgagaataatcgagcaagaagtccagtaggctttcaacagcggctagaaatagctattttagcttataatatggcatattgtctagaacgatttaactagcaccacgcgtataggatatttattgaaaaatcaatttaattagaaaaaactctaaaatgaagaaaatttcatttgatctacattaaatcttggtttttaaaggttccttttttcgtaaactaagtgtacaaagttaattaatacgaaaagcgaggaattcaattatgaaaaagtttaacattaaaaaagtatcattggcagcagctgcattaggcttagcagcgggtggcgcaagtttattggcgattaaccaggctaatgcttctactggcactcaaacgcaacagagtcaaagcaataacacagaacaaaatcaaagtaatacaggtactgcaagtattaatctttctcaagaagatgcagttaataagttttatgaaaagtatggctcaaaatcaattaaggagattgaactagagcaaaagaagaattcatatgtgtatgaaattgaaggttttgattcacaaaatgaatacaaagttaagattgatgcaagtaatggcaatattttaaaagctgaatctgaaaaattagattcagatgatgaggcgcaagcattagatcttaataatatgatgactcgagagcaagctactcaattggctcaaactcaggtatcaggtcaacctgttgaatggtcattagaaatggatgatgatcagccaatctggaaagtagaatttgaagatggaggtaagaaaaccgaagttgaaattgatgctaaaaatcagaagattataaagactgagactgaagatgatgaaaaagatcatgacaaggattatgaaaaagaaaaaaatgacagtcaagagcaccaaaatactgatgaagattaataagtaactaatagttagaaccgtttgttttaagcaagcggttctttttcataaatgaaattactatacgttttttgaatagtagcatttaatattagtaattttatagacagtctgttttgattagactatgtatataaagtaaacgatagtaaggagaaataatatgaaagcagcagtttttgtagaaccaggtaaagttgaagtaagagaagttccaaagccaaaaatcgatggtgaaaatcaagcaattattcgtgttatacgtgcaagtgtttgtggttcagacttatggtggtttagaggaattgctgatcgtgaaagtgggtctttaattggccatgaggcaattggtgtcgttgaagaagttagtgatgaggtaactaatattaaaccaaatgattttgttctcgtaccatttactcatgaaactgtcaaatcttttgtgtaaatagttctttctcgtaaattgattttttaatcatttatttaatcaaaataggattctaaggtatcctgaacctgaccaaagcctttatgaattcggttgaaatagcggtcattgtagctcattgcctggatgccaataaatgcatcaagcgactgttcagttggaaattctgccttaggcttagctttacgcttgatgacgttgttaaaggattcaatcatattggttgaataaattgaagctctgatttgtttgggataattgtagaagaccagcagatcgggctcaatttccttcaaacctttgatgacattgctataagctttattccatctggcatagaatttgtgcaagacagctgcagcttcttttttgcttgtctgttgatgtatctgcttgaattcgttcatgatcttttcgcggtcatccacccggactttagcacagatattgcgcatgacatgaaccaggcagcgttgaaaatgagctttaggataagtcctggccaaggctgttttcatgccaacaacaccatcagaaagaaagagttcaacttgcttcaagcctctggacttcatgttttgaagcatctctgtccagacttcaatgttctcactaggagcaatgcagtagtcaatgacttccttatgtccattaggtttaatgccaatggcaatatagactgcttcacgctcaaacgtttctcggcgcaaaggaaggtatgtcgcatccaaatagacgcagaaaaacttgtcgcttagcttgcgtttgtggtaagcctcaacctttggaatcatctgcttggaaatatttgatacctgggctggactataatgactgccatacattttctcaatcaagtcagcgatttctctggtagttacgcctttggagtagagcttgataatcgtgctttccaaaacatcagagtgctgcttgtagtcaggcagcgtgtgctgatgaaactgaccgttgcggtctcgaggcacttgcacttcaattggtcccaactgggtatcaaccttgcggaaataagcaccatttctagaattgccagtattccagccatttctggcatagggatcatagcccagaaaggcagtcaattcagcttctagcaagttattaacagcctgttgtagctctttgcgcaataaatcgtttattttgtcttgattgaatagagcttgtgctatattttttgtaaaatcattcatgaaggagttcttctttctgtatgtgtttttttgttcaaaccaatcatacgagaaaggaactcctttttctaatgttttaagaaataaatttaaggaattattcatccttacacaaactattttacagtctcttactcatggatatggtcattgtgttgcatgtattaatggttttgaaggcaattgcttgaatttgaagccgggtactaacggtggctatcaagccgaatttatgaaatatgaaccagcaaactctggattagttaagattcccggtaagccaggagattatactgatgatcaattggcatcccttcaaacattgtcagatgttacggcaactggttaccacgcagcattaaacgctgaagttaagaagggcgatactgttgcagttatcggtgatggtgccgttggtcttgccggtgttattggtgctaagttgttgggcgctgaaaaaatcattcttttatcccaccacgatgatcgtgcacaattaggaaaagaatttggtgcaactgacattgtttcaagtcgtgatgatcaagcagttaaagatgtactggctttaactaaggaaaatgctggtgctgatgcattcttagagtgtgtaggtgctgaaagtgcaattgaacaagctggtcaaattgctcgtccaggtgcggtaatcggtagagtaggtgtaccacatgcagagcctaagtcaaaccaattattctggaaaaatgtcggtcttcgcggtggtattgcttcagtaactaagcctgataaagaagttcttttacaagctgttcttgatggaaaaattaacccaggaaaagtatttactaagagttttgatttagatcatatccaagaagcatacgaagcaatgagcaatcgtgaagcaattaagtcattgattatcgtgaacgaaaaataaataatcgcgcaaagcgtgcgtaaaaacggtcgaaaataaaatcgaccgtttttttgcgtgcgaaagagtataattgtagataaaatagattggcaaggtgacttaagtgagagaaacaaagaatttagaatttaaagagaatcttacaaacacatttttaaaaacggttagtgcgtatgcaaattatggtacaggagaagttaaatttggtataaaggatgatggaacaattattggtgtaaaaaatccaattgatttttgtttaaatgtagagaataaaataaatgattccatccagccacatccagattataatttagagattgatgataaaactaatgtagtcacgttgacggtaaaacagggcgataatccaccatatttatataaagcaaaagcttataaaagaaatgatagtgcttcaattgaagtggatagaacagaattatcacaactaattttgattggcgaaaataagacttatgacagtttaacagctgcaaatcaaaatctatcgtttaatattttagaaatggcactaaaagaaaaactaggaattaataaattgacatccgatgtgctaattactcttaatctagaacagaagaatgccggatatactaatgcgggtgaattattagcagataaaaatcattatcgtgggattgatgtcgttcgctttggtgaaaatattaatattatgctggatagggcaaactatgagaatgaatcaattcttaaagagtatgaccaaactattcaaaaatatcggcagtattatcagcgtgaggaaatacatggtgttactcgtaacgttataagtcaaattcctgaagaagcttttcgtgaagcaatagctaatgccttggttcataggacttggaatattaatgctcaaattaaagtttctatgtttgataatcgaatagaagtagtttctccaggaggattacctcataacttgagtaaagatgagtatctgtcaggtcaaatttctattttaagaaatcctattgtggctaatgtcttttttagattgggtttaattgaacaatttggtacaggaataaagagaattaaagattcctatcaaggaagtttagttcaaccacagttcgagatctttgaaaattcaataaaaataattttaccaattctaaaatttattactgatgatttaagcgatgatgaaaagaaagtatttagaaccattcgcgagggtgcaaatacttctacacaaattagtcgagcaagtaattttggtaaaacaaaagttttaaatctacttaaacaactaacaaagcaaggttatgttgagagaattggtgagggtagatctacaaaatatgttttaaataaataatcgcgcgcaaaacgtgcgtaaaaatggtcgaaaagcaaatcgaccgtttttttattgcttagttaaaatctcgtaactccaattaatcagtttgttattataagcaattgctatatttttatctcctgatttgattaatttaattaattttagattctcttcagaaatagaattaacatcgacttcattacagatccattcacctaaagttaaatagattgatttaaagttattgataagcaaaggataaacataattcttggaggccaaggctaaactatgtacataagcaaatatttcttgtgcagcgtccttggaattggtggctttggcaagattttgcatatttgaaatagctgattgcaggcattgttcatcctgttctatacaatctaagcgaacaacatcattttcaattagtttcctgatttcaaaaatcgaatttaaaagtgaaattcggtaatgtcccccgtagaaattaataatttcgttcattgtttgcaaatcgccatcgacacgataatctgctacaaaagccccatatctaggacgaatttctataaaatgtaatgccgctaatttttttaatccggaattgatcacagttcgacttacttgaagttgttcttgtaaaactctttcactgggtaatttatcgccgaggttaaactttcctgttaagattgctgtttttaattgattaacgaagaataaatctgttgcagtgggtacatttattgggtgaaatttcatattattctcctttgcactggtaggaccagaagccaacggctagtttatataaaataactttgtttttctttactttgatcctttttttaattcatattaattataatgaaaacgtaatcatttgaaaacgaaagggttaaaaaatggctgaaaaatatgatgttatcgtagttggggctggcaatggcggcttaatggccgccgcaagttctgctagaatgggcaaaaaaactctattgattgaaagacataatctggctggtggagcagcaaccagttttattcgcggcagatttgagtttgaagtagccttgcatgaattatgtgaatatggtcatgctgataatccgcgtgcagtacgaaaaatgtatgactggttaggtgccaacgtaaaaatgcaagaattaccagatacttatcgctatattatttatggtaaagacggatttgatgttaagatgccagctggtagagaaaattttattaatgcgatggaaaaatatgtaccaggtacttcagaaaagatggaaaagctttttgatctgtgtgagcaaagtatgaatgcgttagcagaaatagcagatggaaaggataaaaaagaagttataaaaaaatatccagcttttatcgagtatgctactaagagttgggatgatgtgcttaacaaattaaaacttcctaaaaaagctcaacaaattcttggagcatattggtgttacattgatattcccactgatgaatttgaatttccgtattttgccactatgttagctacttatgtagaaaacgatgcctatattcctcaaagaagaagtcatgatatgtcaacagcattggcacaagtaatttatgataatggtggtgatgtttggctgagtacaactgtagaaaaaatcttagttgaaaatggtcaagctgttggtgtgcaaattaaaggtgaaaaagtttttgctaaggaagttatttgtggaattactcctcacgcagtttatggcaacatgatggatcaaaagtgtattcctgagtatgctttaaaatatgcaaactcacataaattaggaaccagtgcctttttggtgtatcttgggctaaataaatcctgtcgagaacttggaataaatgactatagtgtgttcattgcttcaacaggtgatactagaaaacaatatgaaaattgtaaaactatggataaaaatgattttatgatcatgaattgcttaaatactgtcattccaaatgcttctcctaaggaaactagtgtttgctacattactaaattagttgatgatggtgtttgggataatgttaaacccaaagattatgaaaaacttaaagttaaaatagctaaaaatgctattgatgagtatgaacaggcaacaggtattaaaattagtgattctatagaagagattgcaattgctgcaccaccaacatttgctcgctatatgggaacacctgatggtgaaatttatggctatcattgtgcaccatgggatcaaattattggtagatcaatggatttaaagaacgttgtaaatccactgccacatttatatttctgcggtggtcatggatttatgtgtgatggttacaatgtttcatacactactggtttaactgcagcaaaaatagctgttagtgatattaataatatgggagcagatcatgaataaatttgaagagattaagggaattattgatttaaagaagcttcaaaatgagcgaaaacatgaaattcaaaatgcttcggatgcagagttgcctaaaaaatatccgatgaacattcttgaagaggagcttcatcctgaaacgcaatatttgaaaatcactaagattattgaccgtgacgatgctaagagctttgtatttgtaccagatgaatcaaaaggtaccagcaaacttgcatatttccaagcaggtcaatatatttctttaaaacttcatattggtaaaagttattgtacacgtgcttatgccatttcaagcacacctaagcaggcgctttctggcgaatatatgctcacaattaagttagtcaaaaatgggtatgtaactccttatatttgggagaattggaaggttggcactgaagtagctgcttcgggtcctgctggtcaattattctatgaaccattaagagacaagaagaccattattgctggtggcagcggtattacaccattttactcaatggctggtgcaattgctgatggcacaattgatgcaaatttgattattttatatggaagtagaacgcacaaccatattttgttgggtgatgaattagatagaattgctgccaaaactgataaggtcaaggtcgttaacatattaagtgatgaagaagtagtcatgtggtaataagtcaatgtaaaagttaaattttatttttaattagtttgttttaaaaccaaaatttgcgtgcatgaaactaagccctatttcaagggattttttaacaactattatttactcctccaaaaatgttttagaccaattaatcacctcggtgtttgatagatttgaccatttttgagcagagtgaaaatggtcctggttaattttcttgcacaaagaacgcaagcgcgtttatgcggagaatagaaagcttcatcgtatttcttttgatagtacttccgaaaaacgggatctctttgtttaatcaggttggcagcttcaaccaaataatatcttagataatgatttccgtttttagtcatcggtttgtgttcgctatcaaaattactagattgcttttgacgccaagctagaccagcgtatttagctagctgtgcttcagtgtcaaagcgatcaatactgccgatttcagcgataataccagcggaataaactgacccaattcctggaatagattgtagtattctctcttcaggaagcgtttggacgatatctgtaattgctttatctaagttcttaatcaatttctgattagttttaatttcggcatagtaaacagataatacggcatcaatcgagtctttcatgactttacctaagcgatatgatcctctaacggcttttctgatcgctttagctaaagtctctggatcagagaagcggccacgtcctttggtttgaaggtagtcaattagatcctcgattggcatttcagcgatttcatcgatggttttactatcagtaacaattgacagcatcgttgcgccaaagatagaagttttaatattgtctttgtcaacggtaactagtttgtttacacgataataaagagtttcaatgaagtgctgcttagctctagtgagcgaagatgtgatttcatatctagctctagttaaacgctgtaaagctaagtattcctcttgccgagcaatagtgacatggtatttaccaaagcgtaagtattcagcgatgtaataggcatcagtaggatcattcttattttcttcgtaaacgtcatgaaatcgtttagtgtttttaggattaatgacatcagtttcaagattaattttttgtaaatcttcgtcattggcaaagaaataagcagggtgaaagctatagattgaagtggcttccatgccgataattactttgtcatagctgttctgtttagcaagttgaagaattatctttttgacctcattagcaccaatcaggtcattagaaaaagattggttaagtaaaggtttttgataattttctgagtcagtaatagcgacttgaagatcttttgaactaacgtcaattccgataaaaagtttcattgagaatggcctcctttctagcaaatatttggtcatagatcgatcatcacatgttagtccctaattacagattctaagacaatctcgcaaaatataagtattcataggttcaagctaaaaagctgcgactgaatctgctctgaatcagtaatagccagaatcgatacagcatgtgagtaagtcattagtaaaactgcttgggcggcagactaaaaaagtagtcaaagctacagaaggaaacaacctataccaattgaccaaggtcaatgacaattagagactagcatctgatgatcgaataaacaaactaaaagaataatcattatcactgatttaatttatataatacgatttaatttatataatacgagaaggatatgaatatggctttatcaatcaggccatcattgaaaaatatgctccagcagataagaattattctatttatatgagtggtccagctgcgatgattcattttgtaaatcaagaaattaaaaagttagatcttcgtccagggcaagtaagacaagaaatgtccggttcagtaaatccatactttttcaagaattatcctgaggaagcaaagaataagactttcaacatgacagttaaaacccgtgatcaaatacaagttattccagcaagaagtgatgaaagtttgctggtggcaatggaaagagcaggtattattgccccttcatcatgtcgctcaggcgtttgtggtgcatgtcgttcaagagtagttaatggaaaagtatttattccatttcctggacgtcgtgcagccgatagtgaatacaactatgtcaacacttgtgttacatttccaatttctgatttaacacttcaagtgccagttcatgactacgcaaacatgttaggttaaaagtcaagactgaaaataaaattttttttgcgttatattatctatatgttgtatttgatagttaagcagcaataccaaatgtagaaaaagaggatttaaatggcaactttagagatcaaggatttacatgtagaagttgaagacaaagataaaaaaacgagtaaaaagattcttaaaggcgtgaacctaactctcaagacaggtgaaattcatgcaattatgggacctaatggaacaggaaaatcaactttatctgagactatcatggggaatcctcgctatcacataacgcaaggcgatattttgctaaacggtgaaagcattattaacatgccagttgatgaacgcgctagaaaaggattatttttagctatgcagtatccagcagaagttcctggcgtgactaatgctgaatttttgcgggtagcaattaatgctcgccgaccaaaagatgatccgatttcagtgatgacttttttgaatgaattagataaaaatctggatttgctagatatgaaggaagccatgaccgagcgttatctgaatgagggcttttctggcggtgaaaagaaacgtaacgaaattttgcagatgttaatgattaaaccaagttttggcattcttgatgaaatcgactcaggtctagatattgatgccttaagagttgtatcacggggagttaatgccatgcgcggtgacaactttggtgctttaatgattacacactaccagcgtttgcttgattatattgtgcctgacgtggttcatgtcatgatggatggacgtattgttaaagacggtggaccagatttagctaaaaaacttgaaaaagaaggatatgcaggtcttcgcgatgaacttgggttacatattaagttagttgatgaaaattaggggggaaaacgtcaaatgttgagcaaagaaaacatacttgtctcatcaaaggaaaacaacgagccttcctggttaactgatttaaggactagttcttttgaaaagatgcataaactttcttatcccaaaatgcagcgtttttcctatcaagattggccgttgattgctaaagaagattttaagtggcaaaaccaacctgacttttttataaaaaaagagaatcatgatcttcttaacgataagggaatcatcttatgcgatctttttacagcaataaagcaatatccagatttagttaaatccgcattagcttccgttattaaaaatgatgaagataaattaacggcttatcattatgcgtatttaaattcaggcttatttctttatattcctaaaaatacagttttagccgaaccaattacagttactttgaaccctacgcaagatccatatatttcacatttattgattgttacggaggataacagtcaagtgaaattcttggaagaaattcaaaatgaggataaagcagttaaatccgcaaacttaatggtggaaatcgttgcacatccaggtagtcatgttgaattttcatcccttgatgaaatggataaggatacaacgctttactttaatcgccgtgcaagaattgaaaatgatgcacatgttgaatgggcaattgcttttatgaatgactgcaacaccttaggcgatttggattcagaattaattggcgaaggcagttatgcggattctaaggcaattgcagttacaactggtgatcaaagagtcggtattaacaaccgagtaaccaaccgcgggccacattcaactggtttgataaatcaacgtggtgttttacttgaaaattctcaactaatttttaatggaattggtcagattgttcatggtgcacatggctctaaggctgatcaacaaaatagagttttaatgatgtctgataatgcacatggagatgccaacccactgcttttaattgatgaaaatgatgttattgctgctcatgcggctagtgtgggtcctgttgatcaaattcaaatgaattatttaatgagtcgtggtattccatatgatcaagctcaaagattggtaattcgcgggttcttaggggctgttcttgatgcaattcctaataaggaagttcggcaaaagatgattgatattttggaaaaaaaattaattgatggacaaactagacgttaagaaaattaaagcagattttccaattcttaatcaaaaaattaatgatgaaaaattgatctatcttgataatgcagcaactagtcaaatgccgttagttgtagaaaaacagattgaacattttactaattttgatcgcgctaatgttcaccgcggtgttcatactttagggctaagggctacacaaaaatatgaaaatgcccgtcaaaaagtagctgactttattggtgccaaaaatgcaagtgaaattgtatttactagtggttgcacagatagtttgaacttagttgcggcaacttatggtgagcaaaatatccaagctggggatgaaattgttgtttcaattatggaacatcatagcaattttttgccttggcagcagattgctttaagaaagaacgctaagttaaagtttattgaaattgatgctaatggtcgtttagatctggaagatgcaaaaagtaaaattactacaaaaactaaaattgtagcgattactcatgtaagcaatgttttggggacaattaatcctattgcggctttaacaagcttagctcataaaaatggcgcgattgttgtagtagatggcgctcaagccgtcggacactttccggttaatgtgactgatttagatgctgacttttatgcattttcaggacataaaatgtttgcgccaactggagtaggtgtgctttatggcaaaaaagctctgttagaacaaatgccgccttatcgttttggtggtgaaatgattacaaatgtaactagaaaaggagctacctgggcacctgtgcctcaaaagtttgaagcaggaactccgaatatttctggcgtgatcggcgtaggtgccgcaatagattatttaggaaagttagatttaactttaattcaaaaacatgaggatagtttaacagcatatgctttaaaagaattatcaaaaatagatgacttagtggtgtatggtccaaaagactgcagtaatcgtactggtgtgatttcttttaatttaagaaaaattcatccacatgatttagcaacagcacttgatttaaatggtgtagaagttagagcagggcatcattgcgcacaaccattgatggaaagccttaagacagaatcaactgtacgtgctagtttctcaatctataatacaaaaaatgatattgatcaattggttagttcaattcaagaagcaaaggagtttttcggtgagcttagataaattaaaaagtttgtataaagcagttattctcgatcatgctcaaactccacgcaattttggacaacttgctaattatactaatgaaacgactgtttataatccaacttgtggtgataagattcacttaactattttggttgagaatgatcaaattaaagatattgcttttgatggggaaggatgcactattagtaaggcttcagctagtatgatgacccaattggtaaaaggaaaaaatattgaacaggctattagtttttctaggatattttcagacttagcagctggcaaaaaacgtagtgaacaagacatgcaaaaactagaagacgctcaagtcttgataagtattatggaattcccggcgcggattaaatgtgccaccttggcttggtggggattagatcgagcattacttggtaaagaaaacgaggatgaggataatgactaaagcagaagaaatagttaaagatgaagattatcaattcggctttcatgataatgtaaaaccaaaattttcaacgggacatggtttaacagaagatgtaattagacaaatttcggctgaaaagcatgagcccaagtggatgttagattatcgattaaaggccttccatatttatgaaaaaatgccaatgcctagttttggtcctgatctttcgggtttagacttagatgatatgctttattatcaaaaaatgactgataaaaaatatcgtgattggaatgatgtaccacaggatattaaggatacttttgaacgcttaggtgtaccacaagcagaaagaaaatatttagctggttcagctgcccagtatgaatctgagatggtttatcacaagatgaaagagcaatttgataaattagggattatctttacagatactgatactgcattgcaggaatatccagatttattaaaaaaatattttggcaaattagttccaattgatttaaataagttttctgccttaaactgtgctgtttggtcaggtggcacttttatttatgtacctaagggagttcaagtccctgcacctgttcaagcttactttagattaaatgcggaaaattctggtcaattcgaaagaactttgattatcgttgatcaagatgcacaccttgattatgttgagggatgtactgcaccacaatattcatctgactctcttcatgcggctgtggttgaagtaaatgtgttggacaatgcatattgccgttatacaactatccaaaactggtctgataatgtttatagtttggaaactaaaagagccgttgctggcaagcatgctacgatggaatgggttgacggaaatttaggtgccaaggtgaccatgaaatatccgagcgtttatctaaatggtgaaggagcacgtggtaccatgctttcgattgcagtggcacaccacgggattcatcaagattctggagcagggatgtttcataatgcccctaacacttctagctcaattgtttctaagtcaattgccaaaggcggtggctcaactgattatcgaggaagtgttaagttttctaaaaagtcggacggttctaaggcgcatgttgaatgtgacacgattattatggatgatcaatcatcttcagataccatcccaactaatgcgattgaaaactcaaatgtggcgatggaacatgaggcaacagtttctaaaatttctgaagatcaattgtattatttggaaagtcgcggtatttcagaaagaaaagccactgaaatgattattatgggatttgttgaaccgttcaccaagcagctgccaatggaatacgctgttgagcttaatcgattgatcagcttccaaatggaaggagcaattggttaatgttagaaatagaaaatttatctgatcaagaaaaagatgtttaccaggcattaaaagatgtaattgatccagaattgcaagttgatattgttgacttaggcttgatttatggcattgaggtaaatgatcatctttgccagattacgatgacactaactattatgggatgtcctttgagtgaatggctgaataacgaaattaccaaggcagcagagagcgttgcggaaatcgatgattgtcaaattaaactggtctggtatccgcaatggaatccaaatatgatgtcgcgtattgctcgaatgacactaggaatccatggataggagcaccattgatggaaaatcatagttttatttcatatgctaatggtaaatcgctagctgagattaatagtacgattgcggttcctaaaactaagaatttctttagaatgctttttgcttatacgggacctggcgcattagttgctgtaggttatatggacccaggcaattgggctgcttcaatcaatggtggacagagctttaactttttactgatttctactattttaatttccagtttaatggccatgctgttgcaatatatgtcggctaaattaggaattgttacgcaaatggatttagcgcaggcaattcgtgctagaactagtaagagattgagctttattctttggattgtaattgaattagcaattatggcaacagatgtggcggaagttattggtgcagctattgccttaaaccttttatttaaaattccactagttatagcaacatttatcactatttttgatgtgtttctactattattattgtcaaaggttggtttcagaaaaatagaggctttgatttcatgtttgattatggtgattttatttgtttttgcctatcaagtcatgttagcagagcccaattggagtaagatcttcttgtctgtttttccgagtcccgaactagttgcacaacatcccgtggttaatgggctttccccgttaacaggtagtttaggtattattggtgccactgtgatgccgcataacttttatttgcattcttcaatttgccaaacaagaaagataaatcatcatgatccagatgatgtcaaaaatgcagttcgttttactacttgggattcaaatattcaacttattctagcattctttgttaacgtgctttttctaattatgggagcagctgtttttaaaagtggagcggttaaagatagttcattttttggactttatgatgctttaagcaatactgcaatgctaagtaatccaattttgatttcagtagctaaaactggaattttatcagttctctttgccatagcacttcttgcttcaggacaaaattctactattacagggactttaactggtcagattgtaatggaaggcttcattcacttgaagatgccactttgggcgagacgattatttactcggctattatccgtaattccagttatcatttgcgttgttatgacagctaacgacacaatttctcagcagcactttgctctcaacatgcttttagaaaattcacaagtcttcttagcttttgctgtcccattttcgattgttccattattaattatgactgatgataaaagaatgatggggcaattcaaaaataggagaagctggtcggtcttaggctggatcagctcgattattttaattttcttgaacttatataatttgccggcaacctttgtttcatttaatataatgcctaagcaagatgccaagattttcgcttatgctattattgtactgattattttattgctggcttggacctgctgggatatggaaaaaagcaaaattagacattaaaagcatttcataataggagaagcaatgtaataaatagtttagatttcattttagcaagtgtaatagcttactttttattatgtaattagatctaaaataaaatcaaaaaatctgaagaaatttaaaatggaggaaaaactatagaagccaaaaatctatttgatactaactttggtaaagttccccaaatatatttagggagaaacaaagtagtcgaaaatgtagttgaatcatttgaagatgttatcaaatatcgattatttacgggatgcgtggagtaggaaaaatttctttattgtctgatattacatcaaatttaactaaaaaaataattcccggatttaaaattgaagtgcaacactaagtgttaaacaaaaaggccatgaagacctaaacttgaagtgacgaaaaatcaagaaaggaagatctttatgaccaattcaaattctagcatttctaagcactatcatcaattaaccagcgtacaacgtggacaaattcaagcaatgctggattccggcataacttcccgtactgttatcgctcaagaagtcggctgccataagtcgacaatcagtcgcgaaatcaaacgcggaagtgtcctgcaaagagacagcagctatttattgtatgagcactattacgctgatactgcacagatttattatgagaagcgtcgcaaaaactgctatcagcgcaatccattgaagcattatgctgtctttttgagaatgctctccagacgctttaaagctaaatttgatgccaccagcatcgatgagttcgttggtgaattcaaaaggactatgccaggctacccttgtcccagcacaccaactgtctatcgctatattgatcagggcttgctggacataagcaatattgatctgcctatgaagctcaaaagacgcaggaacaagcgtcatcacagccatggcggtcacgctttgcacaagaagcatcttggcaattccattgaacagcgtcctaaagagattgaagacagaaaagctccgctgcactgggaaggagatctggttaaaggcgtcagacgcaagaatcagcctgctttaatgactttgactgaaagaaccacacgctttgaagtagttatcaagattcctgactatcgggcaagcacatgccaaaggctgcttcaaaaggagattgacagacatcctgcctggtttaaatcaatcacgtttgacaatggctctgagtttgcggatatgaccaagatcaagggctgccagatttactttgctcacccatattctccatgggaaaggggcaccaatgaaaactgcaatggtcttttgcgtcaattcttccctaagggcaagagcatgaaagacaagtcaaaagcttatgttcaacaggcaactgatgccattaaccacaaatatcgccgaatcctccaatatcacacagcagaagaactcttcaagcaatatatttcctcatagcctaactgttgcacttaatttgacaattcaggtaaaaaaataattggatagttgtatatttggcaatgatttactagaaagccttattcaaagtatttatcgtgaagcaaacacaaaaaaagcctcttaaagaagacagaactctacacgtcaatctttaagagttttttttatttttgaaagtattgtttaactaatgaaaagttattactgttggctgctattaaatcaatagttgtttgctttgataaatatttttttaatgttcgcttgcaaataccaaaacctatcatgaacttgtcactgacaaaaacaacatgttgaaaagatctctgaacctgtttcagaaaagtgaccacggggcgtggcaaatctgcataccaaattggtgatactaagattagagtattgatatttgattcaagtttaactggtttaatagcaacattaatgtgccgaaaacgttctatttttgcctgtgaagttaactcatgatatttattaggatacggattaactggaataataggtgttgcattaaccccataataatgagcaattcttttagctaaacgctcattattgccactgtttgaaaagtagactatttgtttattcattttaagtcgcttcacattaatatgtttaaagattttctttgaagaaagcggcagctttttcaactgcttgatcaacgtattcgggtttatcatatagatcaccgtgagtagcaccttcaatagtgaatagttctttgttagttgaagctgcttttttgagcagatcttctgagaaacggaaagtgtcagcgttgctacccgcaatcatcaaaattggttgagttgagtagcgatcagcaaacaagaaagtggagaagtcagtcattttatcaattgacatcattgataccttgttagttgaacgaggatgttgaacacgtggggtacgataatattcatgagcttctactaaagtattaggcatcccttcagttacttcttctggaacgaaagttccataaattggctcagcaccattagcttcacgagttctttgattagaagcttcttcaagtaaggctaattgagtttcaactgaggtttttccgtcaaaaccgtcacgaatccatgatgctggatcgctcatacttacagctacaacagctttaattcttcggtcggtcatagctgtatgcattgagtagccaccgccagcacaaatacctaactgacctaaacgattattgtcaatgtatggcaaagttgttaaataatcgatagcgcattttatgtcttccacacgttcataaggagcttctaattgacgagggttgccaccgctttcaccttgatgtgaagtatcaaatgctagggcaataaagccatactttgctaaccgtgagtcataattagttgcaatttgttccttaactgtaccagcgggagatgcgattgagaaagcagggtattgcttgttttcatcaaaattatctggaaagaataagataccagacatgtcgtgttcgttgtttttaaaagttactttcttttgcatagttgtagtctccgttcatttattgttgcttattttggttacgattaagtaaacacttgattttattataataaacgaatgatcgttcactgtaataataaaaattaaagtgctactttttaatagcactccaagctaagttaattaatacatcaattctttcttcagtaaaatctatttctcctttgaaatgacgcttagctaattcggtaattggtggctcaatgtaggcaaataataaattagcgtctacatctttaaaagttccctcctcttggccttttttaactaattgatacattggagtaaaataggtgcttgcttcgcgctcatctaattcagtcatataaggcgagttagtgaattgttgcaaaaagagaaaagcatcctgattatctaaaataaaatcaatatagttacgaataaccttagctaggctagacttagcatcatcatttgttgtatcagtaaacattttggcgctcatttttttcttagtatctaaatacaattttttcaacatatcatctttattcttaaaataaatataaattgttgaagctgaaacaccggcatgtttagcaattttcgacattgatgttgatgaaaaaccttctttatttagaagtagaattgttgcttcataaatagcttcttttttgtgttcatctttgtatcgcatatttgtataataaacgatcattcatttatagtcaagcaaaaaattaaatattttcaatattagtaattggttctcgttaaacaggctttatcctacttgcaaaacggaatgaacttggaattatctagcctacaagtttgaccactttgaaaaccatgtgatgtcatttttagatgaagaagaatattatgaattaaagaaaaaagaaatgcttgatgagaataaacatctgataagatagtagtaaaaaagctgtggagccgaatagatgcttgattatagacaattgaaagaacggtttgctcacaatgctaaccctgaatgtgctagacaaatgaaaaatatatgcgaaatcatggttcgtgattttattgagtaaaatcagcaagagttggcaccgttgtcaattcgtgaagggtcaaagtatattgagcatcgttgctttgtttagtaattccaaatcaaattgagaggataagtaaatgtttcaacagatgaagtattttattgcggtggttgatcgacataattttacccgcgccgccgaagaaaataatatttcccagtcagccatttcccagcaaatcaaggagcttgaaaatatgcttgatgttaaattgtttgaccgaaagggaagaagttttgaactgacggcagctggtgaattcttctaccaacacgccaaagaagttgttaaaacaactaatgaattaattgatcagacacaaaaaattggtaaattaccaatcaattatgaattacgtttaggctatttatcgaattttggtactaacgaatttttgcatactgttgcccatttttcgcaaatgtatccagaagtcgaggttaaaatcaaaagcggaactcatgaacagttatttgagttattaaaacatgatcgaattgatctggctttctccgatcagcggcgtgctttatcaaacgaataccacaatgaattcttaactgaaactgattttatggtagttttaccattgaactatccagataataaccgtattttagcaacgcaattagctgacttatcatgcattttaattgttaatgaaacacaaaaagcggctgaggaacaatattatcgggatgctttaggaataaaaagccggtttttaacggttactactatcgatgaggctcaaataatggtagcagccaatcaggggtactttattgttaataaacgaactcaagcgatgattaataaagaaactgttaagacaattccgctttatgccggtgatattccccttcaacaaaattactatacatattggaaacaagataattcaggcttttacattgaaaagtttgctgagctattaaagaaacaattttaagaaatagactatgaggtaaaaataaacgtcaaaaagaagcttcttcactaatttttggcgtttttttgtatataagaatttagcttgataagttttacttatgattattaattgtaaatgtgaattggtttagttattgaagatcgttatgatatagacaattaatcaaagcaaaaagagaaaaactggttttgataaggctttgatggaacagttattagcaaaggacgatttgatgacagataaagaggtaattattgacctttaccgccaggaaaatcgggcaatcgtagataaagacattgaaaccttgggtcagattttagattcaaccatggtattacaccacatgactgggtatgctcagcccaaactagaatggatcgatcaaatccaaaatggtgagcttaagtattattcttctgatgaggagcagatctcagacattcagattgctgggaatcacgctagcttaattggtcacaataaagttaaagctagcgtttggggaagcccagtaagtacattgttgcttcaaatgaagatggaatttgcgaagattaacggtaaatgggcgatcactaagcagatcgccagcacttattaaaggaggtcaaatgttatgaagaatattttaattattggagcaacaggagcattggggactacaaccactcaaacagtattaaatgaaacggacaatcacttaacattatttgcgcggtcagccaatcgaattaatgttattgatcctcaacgagaaactgtaatcagtggggatgtattaaatgatcacgatttagacaaagcgttggtaggacaggatgcggtgtttgcagcattaagcggtgacttagttgcctatgctaagcagattgttgcggcgatggaccgtaataacatatcacgattgatatttattagttcgatgggaatttataatgagattcctgcttcaattggtattagtagtaatttggaaagcaacccaattcttcaatcatatcgggacgctgctgacatcgtggaagcgtctaatttaaactataccgttattcgtcccggctggtttactggtggtccagttaattatgaaattactcataagggcgaaccatttggtggtcccgatgtttcaataaaatcaatcgttgatttggttacaaaattacttaacgatgatgagctttattcctgcgaaagtattggcattaataagccgagttaaatttttacttgccttgtagtggactttaaggtttacagtttgagttaatacaatgtaaaaataattagaggagcgaatttagatgaaagcagctgtatttatggaatctggtaagatggaagttcatgaggttgaaaagccaataatccaaaagccaacagatgcgattttaaagattgttcgtgcttgtgtatgtgggtccgacttatggtggtatcgtgggattactaatcgtgaaaaaggatcattagttggacacgaagcaattgcaattgttgaagaagttggcgataacgttaaagatattaagcctggtgattttgtaattgcaccatttactcatggttgtggtcactgcgtagcttgtttagctggtttcgatggcaactgtgttaaccaagaagctggcagtaatggtggttaccaaggtgaatatcttcgttttactaatgctaactgggcattagtaaagattccaggtcacccctcagattacacggacgagcaattaaacgatcttttaactttagctgatgtgatggcaactggttaccatgcggctgcaagtgctgaagccaaggaagacgatacggtcgcagttatcggggatggtgctgttggcctttgtggtgtaatcggtgctaaattacgtggtgatgatgcagttaagaaggttcttgaatgtgttggggccgtatctgctattgaacaagctggcaagttagctcgtccaggcgcaattgttggtcgagtaggtgttccacaaaccgaaccatcatcaaacacgcttttctggaagaacattggtcttcgcggaggaattgcttccgtcactacttatgatcgtgcgattcttcttgatgctgtattaaaaggtaaaattcatccaggaaaagtctttactaagcgttttagtcttgacaaaattcaacaggcatatgaagtgatggataaacgtgaagcaatcaagtcattaattatcgtcagtgaataatttaatcgtccatcttaagataaggagtgtagtgaatatgagtacaatttttatcgttggttcgtcatccggaattggcaaagcaacagcaaaattatttgcagaaaaagggtgaacggtgattgctactatgcgttcacctgaaaaagagaccgaattaacatcctatcaaaatgtttttatttatccacttgatgtaacgaagcctgaacaaatttctcagacagtctcggaagttcttaaaaagcatgaggtggatgttttgttcaataatgctggttatgggatgaagtctcgctttgaggacatgaccgaagaagccatgcagcagtccttaaacacgaacctgctgggaatgatccgtgtcacccaaaaatttatcccatatttcaaaaaaaagaaaagtgggttaattttgactactacttcccttgctggagaaatgggattagctctagatggtatttatgcagcagataagtgggcggtgactggagtatgtgaaatgctttatcatgagttagcgccatttggcattcaggtgaaaatcattgttccaggggttgtgaaaaccggttttaagatggagacattcgcaatgccgggatttgatcagttactaaaaaatcaaacaaaaatgttaatgccagacacagatagtttagaatcgcctgaggaagtggctcaagatatctttaaggctgtcactgataaggatcgtgatcggatgtgttatgttactggtaagattaccaaagaattatatgaaaagcgtcaaaaacttggtgatgaagcatttcgcagatacattcgaaaccaattgatgtcaaaacgaaaagtataaaattaaaaatagtttagaacctgaattgtcaaattaagtgcaacagttaggctatgaggaaatatattgcttgaagagtttttctgctgtgtgatattgaaggattcgacgatgtttgcggttaatggcatcagttgcctgttgaacataagcagctgacttatctttcatgcttttgcctttagggaagaattgacgcagaagtccattgcagttctcattggtgcctctttcccatggagaatatgggtgggcgaagtagatctggcagcctttgatctcggtcatatccgcaaactcagagccattgtcaaacgtgatcgatttaaaccaggcaggatgtctgtcaatctcattttgaagcagcctttggcatgtgcttgcccgatagtcaggaatcttgataactacttcaaagcgtgtggttctttcggtcaaagtcattaaagcaggctgattcttgcgtctgacgcctttaaccagatctccttcccagtgcagcggcgtttttctgtcttcaatctctttaggacgctgttcaatggaattgccaagattcttcttgtgcaaagcatgaccgctatggccgtgatgacgcttgttcctgcgtcttttgagcttcataggcagatcaatattgcttatgtccagcaagccctgatcaatatagcgatagacagttggagggtagcctggcatagtccttttgaattcaccaacgaattcatcgatgctggtggcatcaaatttagctttaaagcgtctggagagcattctcaaaaagacagcataatgcttcaatggattgcgctgatagcagtttttgcgacgcttctcagaataaatctgtgcagtatcagcgtaatagtgctcatacaataaatagctgctgtctctttgcaggacgcttccgcgtttgatttcgcgactgattgtcgacttatggcagccaacttcttgagcgataacagtacgggaagttatgccggaatccagcattgcttgaatttttccacgttgtacgctggttaattgatgatagtgcttagaaatgctagaatttgaattggtcatgaagatcttcctttcttgatttttcgtcacttcaagtttaggtcttcatggcctttttgtttaacacttagtgttgcacttcaattttaaagaaactgtcaaatcttttgtgtaaatagttctttctcgtaaattgattttttaattatttatttaatcaaagtaggattctaaggtgtcctgaacctgaccaaagcctttatgaattcgattgaaataacggtcattgtagctcattgcctgaataccaataaaagcatcaagcgactgttcagttggaaactctgccttaggcttagctttgcgcttgatcacattgttaaatgattcaatcatgttagtcgaataaattgaagctctgatctgcttgggatagttataaaagaccagcagatctggttctatgtctttcaagcttctgataacatggctgtaaaccttgccccatttggtatagaagtcatgcaggacagctgtggcttcttctttgtttgtctgttgatgcacctgtttgaattcgttcatgatcttttcacgatcgtcgacgcgtactttagcgcagatattgcgcatgacatgaaccaaacagcgttgaaaatgagctttaggataagtcctggccaaggctgttttcatgccaacaacaccatcagaaagaaaaagctcaacttgctttaagcctcgggatttcatgttttgaagcatatctgtccagacttcaatgttctcgctaggcgcaatgcagtagtcaatgacctccttgtgcccattaggcttgatgccaatggcaatatagactgcttcgcgctcaaatgtttctcggcgcaaaggaaggtatgtcgcatccaaatagacgcagaaaaacttgtcgcttagcttgcgtttgtggtaagcctcaacctttggaatcatctgcttggaaatatttgatacctgagctggactgtaatggctgccatacatcttttcaattagatcggctatttccctggtggtcacgcccttggagtaaagcttgataatcatgctttccaagatatccgagtgctgcttgtagtcaggcagcgtgtgctgatgaaattgaccgttgcgatcccgaggcacttgcacttcaattgggccaaattgcgtatgaactttgcggaaataagcaccatttctagagttgccagtattccagccatttctggcatagggatcatagcccagaaaggcagtcaattcagcttctaacaagttattaacagcctgttgtagctctttgcgcaataaatcatttattttgtctggattgaatagagcttgagcaaaatctttggtaaaatcattcatgaaggagttcttctttctgtatgtgtttttttgttcaaaccaatcatacgagaaaggaactcctttttctaatgtttaaagaaataaatttaaggaatcattcatccttacacaaactattttacagtctcattttaaatccgggaaaatagtttagaataatattgactttattaaatttattatgtaatatacttactaaataaatggtatgaataaccactaagaataggaaattagctttaccttaactagtcagcgaacccaaattagtgtgagtggggatagaaaagtaaagtgaaagtagcctaggagtgcttgaagtgagagtaattgtaactttaggagggcgcgcccgttatagcgtcaacgtatctagttttgctatgtatggggtaagggaataatagtaatattattctaaaataaggtggtaacacgcgtgatagcgtccttataagctttatgcttataaggacgtttttttgtacctagtattaatataatttttatcgaaaggaatattaaaatgaaaaccaaaaaagcgagtattaggcggtcaatgattatcgcatcacttattttcggaatgttgtttggagcgggaaatcttatttttccagttcatttaggtcaattagcaggtagtaattggctaatagcgagtagtggctttctgctttctggtgttttactgccattaatggcgctgttggcaattagtattaccaagtcgaatgggatctatgatcttgcattgccgaatggtcgttactatgcacttatctttttaattcttgttcacgctactttgggaccactatttgcaactccccggacagccactgttccttatgaaattggaattgccccttatttatctaagtcaactaatactttgggattattaatctactcagcaattttctttagtttagtttatcttttttcaaatcatgagggaaagatcactactttaatcggtaaagttttaaatcccttgttcttgttattattattccttatcttcttattagcattcattaatccattgggttctagaaatactgctgctataactgcttcatatgcaaggcatgctttttccaatggctttttgcaaggttacaatactatggatggcttggcagcattagcctttggaattactattattactgcaattagagaattaggtattaagaagacacggcaaatttcacttgcaacggctaagagtggttttctcggaattgcgggagttgcaattatctatttagctttaatttggctaggcgcgactagtttgcatcaatttaaattagcagcaaatggtggaattactcttgctcagatttcacaccattacttaggaactgctggagatgcaattttagcaactttagcaactatcacttgtatgacttcagcaatgggattagtaattgccttctcgcaagatttccatcgccgttttcctaaaatttcgtatcgaacatttttacgaatcaattgtggattatcatttctatttgctaatttaggactcaaccagattattgcatggtcaacgccaattctgatgttcctctatccgttagcaattaccttaattattttagggctactttcaccactgtttaagaatgaccggctcgtttaccggattacaactgagcttaccttaattccagcattctttgacatgttaaatgcgttaccagctgggttacatgaaagtcgattattacagacactgcttggttttgcccaacaatacttcccatttttcaatttaggctttgggtggctgacctttgggattgcaggattaattcttggattgatttgtcatgtattaagagtaagaaagcgtctaggactaattagtgaataatatgtattcatcggtcgtaaaattaaatacattaaaaaaaggattaactttgctcatactgtaacttaaggtgcagtatgagcaatttattagaaattatatagatgcaatttatgaatgggattgaatattaatggaaagcctaataagataaactcaacttatcagcaaatgacaggtgtaagagagctttatatgaaaaagcatgttcaagtcctaaatattattggtgatggtgacagtacttataaagttgaaaagattaatggcaaaaatgcacaacattcaaaactgcatgaaaatgctcaagttgatcaagcattaattaagtttttatggaataaatagagttacttaatatatctattgtaaaagaataaaacaggtgctattattacagcataatattattcaatgaaagaagggtttaggttgcgcttttaatcttgtaattagcatcatagtccaaatagtaatttatattatggagagactatgtacttttagcaggattaaagcccaggccttcgattattacaattcattttcgtaaggagagagtctatgcttgctagaagtatgggctctttttgtgcgaggtggttggatgagtaatcttaagattagtaggttatcttttgaatatgaagacagcaatagatatatttttaaaaatcttaacctagaccttgatactgattggaaactaggtttgattggtcgaaacggaagaggtaaaactacttttttaaacttactgcgaggtaagtattgtggaactggtcaaattcaaggtaatgctagcttttcatattatcctgtaaaaattcaaaattctaaaaacattactttttatgagttacaagatcaggttgcctttgaacaatggaagctggaacgagagttaactctaatgaatttagatcccgatttattatggcagcctttcaataccttgagtggtggtgagcaaactaaaattttgctagctttatcatttacagatcaagattcttttcctctaattgatgaaccaactaatcatctagatgagacaagtcgtaaacaagtagcagaatatttaaatgggcatgatcaaggatatattgtagtcagtcatgatcgagattttttgaatcaggtaactgatcatatattagcgattgaaaatacagcgattcatttgtatcaaggaaattattcgacttatgaggtaactaaaaaaaggcgagatgattttgatcgtgaaaaaaataaaaagcttacagggcaagtgaaaaaattgaaccaagaaaaggtacaattccataattgggcagctaaaatagaggcacgtaagaaattagggatgaaaacacagcatattatcaatcgtcgaaccagattaaataagggagcgatcggacatcaagctgcaaagatgatgaagaagtcgattaatgcacgcaatcgcatggataagaggattgcggaaaaagaaggaatgctaaagaatattgaaaaagttcctactctgactatgaattttcaggcagattatcatcgtgagattttgcaacttaatgatcttagcttgcaactaaaaaatagtagagaactatttaaaagcttgactttgtctttgaataatcatgaaattattgctattgaaggtaaaaatggttctggaaagtcaacattaattaagcatttactgggtatctctcaaaatctaattgccaaaggtaattatgagctaattgaaagtttgaaaatctcttatttaccacaagaatttgtaatgtatagcggatcattaaaagactttgctaaaaaatatcatttgtcttatgaagctttgttgagcaatcttaagaaaatgggatttgcgcgtgctgattttacaactagaattgaaaaaatgagtatgggacaacagaaacgagtagctttggctaagtcattgacagaacctgctaatttatatttatgggatgagccagcaaattatttagatgtattcaatcaagatcaattaattaagcttcttaagagtgtgaagccaacgatgttactaattgagcatgatccttacttcattacatcggtagctgatcagcagattaaattaacaaattaactagatatttctataaaataatcttattaggaaaagtaaaattataagatatattggttggaaagttcgattatcataggcataataagctatagagatgataaacatgaaaaatgaattttgtcacgatgaaatgaaatgtcagaaaaattgtccttgtgcagataaggatggcatttgccactgcaaaatggtaaatagtaaagaatgtgtttgcaagagtcattgtaaggaacaagaaaagtaacaaaagagcgccagtagatttagtttaagtttactggcgctcttttaaataaaaatcacataattttgttgcgtttaactggaaaaagaaatgaaataactggaactattagataaagaatcattgctagttttgcattgaataatgacagaatgatcaatattacatttaaaaataaagtaaccgtcatttttctaataaaggagcggctaataataatccgcatgatttgggaatagcgcgcagtatttttagcaccaaaatattgaattagatattctaagattttggcaattaaaaaaacaattcccaagttagctacagcgaaagaagaattttcagccataatccatttagtcatgactggcagaagtgataaatcagctaaaaaaaagaagtctagaatagcaatcgcttttgaaggcttgaaaatatagtatgaaaaagataaatgtagatcataccagaaatctgccacaataaaaaaagtgattaaaaagacagcaatattgctaatgaattgctgataatgaatttcatgcagagcaggttgaatttctaaaacaataattgtaataataatggccatcactccatcgttaaaggcttgtagactttcaggctctttcttttgggcctcagctaattcttttttgacattttttaatttatctttttcttggtctgagaattgattaaaattgtgtcttctgggatttcgtggcatggctattcctccaattaaattaatttattaatcaataattactttagcataatttttcacaatcaagctaaaaactgattcttataaattaatatcatattttgctttttggacaaatataaagtatgataaacagcaatcaaatattaggagggaatagtagaaactgtcaaatcttttgtgtaaatagttctttctcgtaaattgattttttaattatttattttctaaggtgtcctgaacctgaccaaagcctttatgaattcgattgaaataacggtcattgtagctcattgcctgaataccaataaaagcatcaagcgactgttcagttggaaactctgccttaggcttagctttgcgcttgatcacattgttaaatgattcaatcatgttagtcgaataaattgaagctctgatctgcttgggatagttataaaagaccagcagatctggttctatgtctttcaagcttctgataacatggctgtaaaccttgccccatttggtatagaagtcatgcaggacagctgtggcttcttctttgtttgtctgttgatgcacctgtttgaattcgttcatgatcttttcacgatcgtcgacgcgtactttagcgcagatattgcgcatgacatgaaccaaacagcgttgaaaatgagctttaggataagtcctggccaaggctgttttcatgccaacaacaccatcagaaagaaagagttcaacttgcttcaagcctctggacttcatgttttgaagcatctctgtccagacttcaatgttctcactaggagcaatgcagtagtcaatgacttccttatgtccattaggtttaatgccaatggcaatatagactgcttcacgctcaaacgtttctcggcgcaaaggaaggtatgtcgcatccaaatagacgcagaaaaacttgtcgcttagcttgcgtttgtggtaagcctcaacctttggaatcatctgcttggaaatatttgatacctgagctggactgtaatggctgccatacatcttttcaattagatcggctatttccctggtggtcacgccattggagtaaagcttgataatcatgctttccaagatatccgagtgctgcttgtagtcaggcagcgtgtgctgatgaaattgaccgttgcgatcccgaggcacttgcacttcaattgggccaaattgcgtatcaactttgcggaaataagcaccatttctagagttgccagtattccagccatttctggcatagggatcatagcccagaaaggcagtcaattcagcttctagcaagttattaacagcctgttgtagttctttgcgcaataaatcatttattttgtctggattgaatagagcttgagcaaaatctttggtaaaatcattcatgaaggagttcttctttctgtatgtgttttttttgttcaaaccaatcatacgagaaaggaactcctttttctaatgtttaaagaaataaatttaaggaatcattcatccttacacaaactattttacagtctcgaatagtatgaaaaaaataatcgctaagcctgtgggaatgtttgaattattctatgatttagtttttgtatacgcaatttctcgaattactgcaatgattcatcatcctgttaatggcagtattcctttagttacttttcttcaatttttattggttgtaattgtagtaatgcaaatttggctttatcaagttatctattttaaccgatatagcaaaaatcaatttttagatattggcggtttaggtttaaatatgtttgtagcagtttatctggctaacaatattaatactgaatggcaagttacttttcactattttaatattgcaatggctgttatgatcttaattttattttgtcagtatctatttgtaaaagcagataataatgataaacaagcctttttaatcattttaggaatagaatttatcttaattattgtaggattaatcatcggctaccctgttggaatttatttttgtataagtggttatattgttggttttattttgccattgtttttaaaagggatgtttaaaactgaacgagtaaatttccctcatttggtagagagagtaagtttaatcgtaattattgcctttggtgaggctatcgttaatttgacaagttatttcaatagtaagacacctttagtttatgctgcttttttgtttttatctttagtattgatgtttgcaagctatgtagttttatcagataaattaattgaccatcatcagataagtaaaggctttgttttaatgtatagtcatattgcaattgtagtagcaatacttttgtcaacagtagcaatactgtatttacaagtgcatgacataaataaaacttttttgtttttcctgattattttttcaatggccttatattatttctcattagctataaatcaagtatataacaagagtgaatgtcgatttagtattcgtaatctgttaacattgctactaatttttgcactaggagtaagttacttatgggttgtgataaaatctaaaataggtatttcaatttacctattaatttggaattgagactgtaaaatagtttgtgtaaggatgaataattccttaaatttatttctttaaacattagaaaaaggagttcctttctcgtatgattggtttgaacaaaaaaaacacatacagaaagaagaactccttcatgaatgattttaccaaagattttgctcaagctctattcaatccagacaaaataaatgatttattgcgcaaagagctacaacaggctgttaataacttgctagaagctgagttgactgcctttctaggctatgatccctatgccagaaatggctggaatactggcaattctagaaatggtgcttatttccgcaaagttgatacgcaatttggcccaattgaagtgcaagtgcctcgggatcgcaacggtcaatttcatcagcacacgctgcctgactacaagcagcactcggatatcttggaaagcatgattatcaagctttactccaatggcgtgaccaccagggaaatagccgatctaattgaaaagatgtatggcagccattacagtccagctcaggtatcaaatatttccaagcagatgattccaaaggttgaggcttaccacaaacgcaagctaagcgacaagtttttctgcgtctatttggatgcgacataccttcctttgcgccgagaaacgtttgagcgtgaagcagtctatattgccattggcattaaacctaatggacataaggaagtcattgactactgcattgctcctagtgagaacattgaagtctggacagagatgcttcaaaacatgaagtccagaggcttgaagcaagttgaactctttctttctgatggtgttgttggcatgaaaacagccttggccaggacttatcctaaagctcattttcaacgctgtttggttcatgtcatgcgcaatatctgcgctaaagtacgcgtcgacgatcgtgaaaagatcatgaacgaattcaaacaggtgcatcaacagacaaacaaagaagaagccacagctgtcctgcatgacttctataccaaatggggcaaggtttacagccatgttatcagaagcttgaaagacatagaaccagatctgctggtcttttataactatcccaagcagatcagagcttcaatttattcgactaacatgattgaatcatttaacaatgtgatcaagcgcaaagctaagcctaaggcagagtttccaactgaacagtcgcttgatgcttttattggtattcaggcaatgagctacaatgaccgttatttcaatcgaattcataaaggctttggtcaggttcaggacaccttagaaaataaataattaaaaaatcaatttacgagaaagaactatttacacaaaagatttgacagtttcttggaatttgttatttttcttagaattttatattaaaggcaataaaaatgaattcagatgatcaatttatcaagtgggcgacagatttacaaagtttagctcaagcagggttgcattatggtcatgatgtatttgatcgtgagcgctatgaaaaaatccgtaaaattgcaggcgaaatgatggcagctaggacaggactacctaaagaacaaattaaaacactctttttgggtgatgagggctatcaaacacctaagattgatacgcgagcagcaatttttaaggataataaaattttgcttgtccgtgaaaaaatgactcaggaatggtcattgccaggcggctggaatgattatgaccaaactacagcacaaaattgtgttaaagaggcatatgaagaagcaggtagagtagttagacccgtcaaaattattgcagttcaagatcgtaatcatcataataaaccaattttggccaccaacattacgaaggtattttacttatgcaaagaaattagtggtgaatttaagccgaacgatgaaactgatgcctgtgattattttgcattagataatttaccgaagctttcacttgggcgaaatactgaggaacaaattaccatgtgttttgcggcaaataatgatcctaattggcagactcaatttgaatagaaaatttgaaaaataaataaaaaagttgttgacaacgattatattttgattaaaatagttattaacaaatttaataaatctgaaaacaaagagaaagaagagtaatttagacttaatttacagcgagtctcgttaggtgtgaggagataaatcctaagtttaaatgaaaatcactttcgagttctatttcttaacttaaagtaagaagtagtgggagcacccattatagtgcctacgtatcgtcaagtagttgactgtacgtgaaaggtattgctagcaatagtgatataaataaagggtggtaccacgctcaaagcgtccctcagttacaatttgcagctgagggccttttttgtttatcagggatgttttggaggagagaaaatgacagatcatacatcgaaaaaacttacatggaaaaattatctcgttgttgcttccttgctgtttggattattttttggggctggtaacctaatctttccattacatttaggacaactagctggagcaaattggggaacagctgcagttggctttttgatcacaggggttttattaccattattctctgtattagcagtagcaattactcatgcagacggagtatacgacatcggtaagccgctgggtgccggatttgcagtagtatttatggttttaatccatgccacaatcggaccattgtttggtaccccaagaactgcaaccgtttctttcacagttggtattgcaccatttatgccgaagaatatgcaaagttccgctttacttgttttttcagctttattctttttagctgcttttgctttttcttatcatcaaaataatatcttgtctaacgttggtaaggtattaaacccattattcttagcattattattcctagtgtttcttgtagcttttgctcgtccgttgggtaatccacaaactgcagcagtaactgcagcttataagcatggagcattagtaaatggcttcttagaaggttataacacaatggatgccttagcaggcttagcctttggggtcacggttgttacagctgttcgcggcatgggacaaaaagatgctaaaagtgtttcaaaagttgttgctaaatcaggtgtcttggccgttttagaaatcggttttatctacttgttattgatcttaatgggtgcaatgtcactcggacgctttgcagtttctgataacggtggggtagcctttaaccaaatcgttaacgtttatggcggtgtctttggtcaagctttacttgcattcttattgacagttacctgtttgactactgcagttggtttggttgctgcttttgcgcaagactttcataagcattttcctaaggtaagttaccacgtttggttagcacttagttgcttggcatcattcttaaccgctaactttggtttggatcaaatcatttcatggtcaacaccgatgttaatgttcttatatcctttatccatggttttgatcttgctatcagtttgttcaccattgtttaataaggaaggtgtagtttactttttcgtaatcctatttactgttgtgccagccttaggcgatatggtggttgctttcccaagtgtagttagtcaaagttcattcggtttagcagtagcttcacttagaagtcatttgccacttgtcagcatgggcttatcatggttagtgccagcactggtaggtttagcaattggtttagttgtatatcatgttagaaataaaaagacagtaccggttttagaagaagactaaaatttgtgtattttagatgaaggcagtgattgccttcatttttttgcttctgagatgaatagttgtgaatagacatgataaaattaaaatgaaattattttaataaggagaaccacatgcttcaagtacgatacggtattaacttagcaccagaaattaaagaaaataagattgatattattaagaatgagccttttactatttgggatgcaggtgtaataaatattcaaaagcaaaagtactatttattagttgaaaaagacactagttttccaattttattaactaaacttgatgccaagctatttaataatgtttttgctaatgcgattaaaagctatgactttattttgtttaaacagcaacaaaaattagtttcagcggtaaagtccaagcaaatgtctttttacgatactaaaagccaagctagtttaatgctagaaaaaattcgtaaacttatagaggataatcaaagcgaatatttaaatttgattgatgttgtaaaagatgaaaagaatatggtagataagctaactgtaatgtcagcgactatttttgccttggatagtcagattggacaaaattttatttctaagatgattgatgaggttagtacgtattttcctattaagccgcaaaaaccaaatcgaagatataagtatgttgacttagtgccaaaatttgaagatttctctaattttgaaaaatatgaaaataaatcagtaaaaggcaatgaaaagattgttgctaaaattaaagaaaataatcagaaactcattgatcaatatgctaaatatgtaccagcagaaataggatatatccaacctgatcaaatgctgccggattatctaaatcattatttattacgtaataagatccatttagttgctaatgatttaggagaagcgatttcttatttatggattatgatatctaacaataaactacatccgctagaaatagagcagattacaaatactttgaaaaatttctatgtatttttgagtagagtaggtcttattcgtaaaactgatagtaaagaaatagggatgaatattgactgggtagttgaagaaattaattcatactccgatcaaagcctggatgaggatttgataaacgacatgatagcggcaattgaagcaaatccgaaaaagattttggaacttgaagatttagatctgtctcctcaggatttgtctagaattttagaaggcttgcgaaaagatcttgagagtcatgataaaaagcagaaaacacgaaaaaagacaatttttgaaaatcaaactcgcaatcgagctacctatgaaattagagtaaaactaaagtcttttaaaccatctacttggcgtagatttattattagtggcaatacgtcagtgaaaacattagaagttgctatgctagatatgtttaatgcagattttggacatatgtttgatttgctgaataaaaaaacgcaggaacgctttgaaaatgcagaaagtatcgctgaagcgaaagattgggatccggctacaggcatagattatgaaaaagctaaggtttcgtattttgaaaagagagataaattattattaacttatgattatggcgatagctgggaattcgaagtagatattaagaacatcactactgatcaagcagctcctaagtgtccaaagatactttctggaaaaggttatggaataattgatgacattggtggtgtatggtctttgcaagattattacgatacgcctaaagataaagtagatcctgaaatgattgattggttaatgggtggagaagcaattgatttagataagtttgataaggaagaacttaatcaaagaatggaacaatataaggaataaatctgcattgtttaagatacccagcgtgtcatgggattgaagtgtttgaattttaattagtaaagtctatttaaacaagtccttatgtacatccttaaaatgcatccctttatacatatcaggggtgctatttttgatagcccaatttgaaattgtatttaaaactggcagaagcgtctttcccttatttgttgatgaatattccacccgaattggcatttcattatattgttttctttcaacgatatcttgttgttgcaattctttaagcgaatccgctagtgctgcatcagagatattttccatttgatcttttatttctctatacctcatagcctttttatgtcctaagatacataacaaccttggtttccatttgccaccaaaaatatctaatgcataatcaacagtacaatagtattcttttggtaattttctttgatacataattaacctcactcaataattctttagtagctaaagctctttttaaaatatgtaaatcttttcagctttatcttactataaaaatgtaagttgattaaagcagaaaggaaaattgatatggcagtaaaagcttatttagaaattacaatgcagattccagcagaaaacagaaaggcagctgcaaaggtttatagtgattaccgtaaaccatttttagaaacaattccaggtgctgaaagtaaggcattacttgtacgcaatgaagatgtgcaggtattgcatggatttgattcaattgaacatgcagaagactatctaaagagtgaaatgtttaccaagcatgtttttccaggtttgaaacctacttggactgctgatccagaagttagaatcttttcagttgtaggatagaatattaaaaatatcaaacggtttagtttgatatttttttatttaggttaagtaaagaggaaaaatgaaaataactaaaatcgatctattatatggtgatccagttgaagataattggcgaccttctttttgccgtatctatactgatagcggaatttatggtgatggtgaagttgctttatcatatggcggagcaaaagaggctgcttttgctgaaatgaaagaattggctcctatgttaatcgggatgaatccattagagcatgaggtcatctggcaaaaaatgtacagaaatagcttctttggtaaaaacgcaggtccggtaatttttggcgctatttctgcttttgatattgccttatgggatattaaaggaaaatattatcatactgcgctgtgggaactgcttggtggaaaacaacgagatcatttaaaagcatatgctagtcagctacaaatggggtggggagaatcaagaaggccagcagcgacacctcaagactatgcagataatgttaaaattgccctaaaaaaaggatttaaagccgttaaaattaacttcttaacatttgacgagcgaggaaagcaggttccatggcaaaaacagactgcttttttatcgaataattatttaaatttagcagaagagcgaataaaagcagttcgtgatattttaggaaaagatggcgaattaattttagaaaatcacgctttaactgataagttatcagctgttcagtatggaaaaatggcgtcaaaatataatattttgtattttgaagaaccagtgaaacctgatcccgatctattaagttatgttcatcaagaaacaggtctaaatattgcttctggtgagagaatgtattctcgttggaactttaagcgtgcttttgatcaaaatagcattcaagttgcgcagccagatatttgcacggctggaggagtaactgaagttaaaaagatatgcgatatggcagatacaagtgagcttggtgtacaaatccatgtagccggaagcaatttagcaactgcagtgtcactaaacttagaagcagcactccctaactttgtgattcatgaatataacgtcaatactgagatgccaaaaatgcttaagttaactaaatatgattatgaacctgacaatggtgtatttacagttcctaacaagccaggagtcggtaatgaaatatctgattatgcttttaagcatagtagggtagttacggttaagtaaaattaaggaatatctctgatattttgctagcaaagaaccactttttgtttctatgcctattagtattaaaaaatacgattaaaacaattacctaagcatttaagttagagtaatcgtttttccatgtatttaaaatttttacatcaatttcttcaattcatttatggcagcatcatagtttggctcatgagtaatttcatcaacaatttcacgataaacgattttaccgttaggatcaagaattcaaacactgcgtgctaaaattccagagtctggaatcaacaagccagttgccttgccaaaggatagattttcatcagacagcaattgcatatttttaactccttcagctgcacaccaattttgttgatcttggatagtgttagtcgaaatagttaaaaagttaacgtcaggaaactgatccattgttttgttaaaagtcttagtttgaatactgcagacaggtgtgttgatatctggtacaacactgatcaaagtatttttacctaataaactatctttagtagcttcttgcttatttttgtttaaaactgtaaaattaggcatttcatcgccaaccttaggtggtgtgccaattaattcaacttcttttcctttaaaagtaactttcatgaaattcctccttttattatcttttaacttaaatatagcaaactcagttcagtaacttaaatatttagcttacagatattaatttttagaatctaaaattttacttttgaattttaacatcttgtattttgaatttaaccacgtatttaaatagtgaattcggaaaggaagacttcttatgttaattggaacttttagcttattctcaataatgatgatgttaaataattggtctatcaatatttggacattgcttatttttattctttcatacgttgttatttggataacaatcaagttaacacaaaatcgccaaattaagaaacgtaatagctaattaataatcttcattcattcgctttatgcatagctaactattaccaatgaatattttttataatagttattttgatttagaataaaacaaagagaccgtaaaatattttgtgtaaggatgaatatttccttaattttattttcctgaatattagaaaaaggaatccttttcccgtatgattgatttgaacgaaaaacatactagaaaagagattccttcatgaatgattttaccaaagatatggctaatgctctattcaatcaggataaaattaatgatttatttagacaaaagctccaacaggctgtcaatgacctgcttgaatccgaattgactgcctttttaggctacaatccttatgagcgcgatggctggaataccggaaattctagaaatggtgcttattaccgcaaggttgatacgcaattcggacaaatagaaatcaaagttcctagagacagaaacggtgagtttcatcaacacactatgccagattataaaaggcatactgatgttttagagcaaactgttatcaagctctattccaagggcgtcacaacccgagaaatcgctgatttgattgagaaaatgtatggcggctattattctccagctatggtttccaatatttctaaagaaatgattcccaaagttgaggcatatcatcagcgacatctgtcagataagttcttctgcgtttatctcgatgccacctatattcctcttaagcgggtcacttatgagcgcgaagcagtttatatcgccatcggtatcaaacctaatggtcataaagaagtgattgactactgtattgcgcctactgaaaatattgagatttggagcgaaatgctcaaaggcttcaagagtcgcggccttgaacaggtagagctcttcttgtctgacggagtagttggcatgaaagaggctatctgccagtcctatcctaaagcgcattttcaacgctgcttggtacacgtcatgcgtaatatcagtgccaaaatgcgggttgacgatcgaaaaaaagcactggatgaattcaagcagattcatactcagtcaaacaaagaaatggctgtacaggtgctgcatgaattctatcaaaactgggaaaaagcctacaaaaacgtagttagagatcttagacaggttgagcctgatctgttaaccttttacaactatccgccagctattagagcttcaatttactcaactaacatgattgaatcctttaacaacaggcttaagcggaaaaccaagcctaaaacagaatttccaactgagcagtcgcttgacacctttattggagttcaggcaatggattacaatgaccgttactttaacaggattcataaaggatttgggcaagttcgagacaccctagaatcctattttgattaaaagataaataaaaaagtcaatcaacgagagagattatttacacaaacttcttgacagtctcaaaaccaaagttagaagtgaggtaataatatggcaaaaaatgaagaagaagtaaaagatagcgtttttggttttggcaaatctaacgaagcctttgccaagttttttaagggtacaagttacctcaaacctttagcagaaagtaaagaagctaagaccgcagttcataatgtaagttttgaaccaggatgccgcaataattggcatatgcacacagtgccacaaattttaatcgcggtagctggtgaaggctggtaccaagaagaaggtaaagctgcacaaaagatgcttccgggtgatgttgttattgtaaatccaaatactaagcattggcatggagctactaaagattcgtggtttgctcacattgctattatggctggtaatagcaagaatacttggttagaacccgtttctgatgaagaatatgataaattgggctgattaatcggaaaattcaatatgtaaattataattaaaccaaaaaattcctcttaaagaagacgaaactttacatgtttatctttaagaggaatttttatttttgaaagtattgtttaactaatgagaaatgattactgttagctgttattagatcaatagttgtttgtgctgattttaaatttgcttacaaatataaatctaatcatctggagtcaattgatattagaaaaaagaataaaattaaaaacaggttagaataatattgactttgtttaatttattatgtaatatacttactaaataaatggtatgaataaccactaagaataggaaattagctttaccttaactagtcagcgaacccaagttagtgtgagtggggataggaaagtaaagtgaaagtagcctaggagtgcttgaagtgagagtaattgtaactttaggagggtgcgcccgttatagcgtcaacgtatctagtttttctatgtacggggtaagggaataatagtaatattatctgaaacttgaaagctaagattaacgctccttccccgcgcctcttggctttttcttatcaaaaataaaaacgcaggatctctctgcgttatactttaagtgtcgacctaaaaagtaaaggagatcctgcgcaatgaacagtatagaacaaatcgacacagaaaatgatactaaatccttaatttcttcatttattaatctacctgaattgtcaaattaagtgcaacagttaggttatgaagagatatattgcttgaagagttcttctgctgtctgatattggaggattcggcgatgtttgcggttaatggcatcagttgcctgttgaacataagcagctgacttatctttcatgcttttgcccttagggaagaattgacgcagaagtccattgcagttctcatttgtgcctctttcccaaggagaatatggatgagcaaagtagatctgacatcctttgatcttggtcatatccgcaaactcagaaccattgtcaaacgtaattgatttaaaccaattaggatgtctgtcaatctccttttgaagcagcctttggcatgtgcttgcccgatagtcaggaatcttgataactacttcaaagcgtgtggttctttcagtcaaagtcattaaagcaggctgattcttgcgtctgacgcctttaaccagatctccttcccagtgcagcggagcttttctgtcttcaacctccttaggacgctgttcaatggaattgccaagatgcttcttgtgcaaagcgtgaccgccatggctgtgatgacgcttgttcctgcgtcttttgagcttcataggcagatcaatattgcttatgtccagcaagccctgatcaatatagcgatagacggttggtgtgctgggacaagggtagcctggcatagtccttttgaattcaccaacgaactcatcgatgctggtggcatcaaatttagctttaaagcgtctggagagcattctcaaaaagacagcataatgcttcaatggattgcgctgatagcagtttttgcgacgcttctcataataaatctgtgcagtatcagcgtaatagtgctcatacaataaatagctgctgtctctttgcaggacgcttccgcgtttgatttcgcgactgattgtcgacttatggcagccaacttcttgagcgataacagtacgggaagttatgccggaatccagcattgcttgaatttgtccacgttgtacgctggttaattgatgatagtgcttagaaatgctagaatttgaattggtcatgaagatcttcctttcttgatttttcgtcacttcaagtttaggtcttcatggcctttttgtttaacacttagtgttgcacttcaattttaaatccgggatttattaatctaattggtctagctaagttaactaaacaagtcaattttaagcgtaaatccaccgtttcattaaccatgattatctcttggctgatgtcagtacattttgctcggctttctttattcagagctaaggatgacaaacgtttttccgttagaactgctcgcaatgtacttaacgatggaagaatcaactggcaaaaactattatgcttgattgcagcccggctcattggctgcttaaaaccatttatcgataaaagacgccgacttgcttttatcgttgacgatacgctgatggctcggtctttttctaaaaagaccgaattgctagctaaagtctatgaccatgacaagcatgagtatttgaacggatatcgtggtttaactttaggctggagcgatggcaataccttcttgccggttaactttgccttgatgtcaaccaaaaccaagaaaaatatgattggagctgctcccattactgctgatgaacgttcaatttctggtaaaaggagaaatcaagctcagagaaagatgaatgatgtaactgtagagttgattagacaagccttacgattaggagtagaagctaaatacgtcttattcgattcttggttttcttctccaagaatgttttggattttaaagaagatcggtttagatggacttggcatgatcaagaagagttcaaagatttattacatttatcgccatcgccgctatagcgttaaagacttgtatgatcgtttggctgcttcaaacatccgtaaaaagaaacattatctttattcaagcatagttgaggctcaatatcatggacatagctttttattaaagctcgtctttgtctccaaccgtggaaacaagaacaagtatttggttttagctactactcagacaaagcttagccctgaagaaatcatccaactttatggtcgtagatggcaaattgaaacatattttaagacgtctaagcaatatcttgctttagataaatctcaagttcaaagctatgatggccaatgtggctatatcgcagttacagcaataacttatgatctattgacctggcaggaaagacaaaatacagatgataagacaatcggagatttattctatctaatgaacgaatccttacctgatattagattcgtagatgcattggtctacttaatttcagaattaaaagagcttaaacagaatagttttgaaaagatagatgaagtaatcaatgactttattaaccaactgccacgattcatacaaattgcactgaaacagatcatataaaaactaattacgtctaagaaagctcaatagtgacaggacttgagcttgattttggtgctttcaattttcagatacttaattacttgtttttgaatgtaaacatcataaactaaattcttttgccgcctcttctttagatagtggcccatttgctttagcatcttctgcaaaataaatatatcattttggaacaagtatctaagggtaaagttggtactatgatgggtgtcgggagtatgatcactggaattgcactagcacttgggtcgacctttggccgaatcgtccgtcctacaggcactaagtcggctgatttaaccagaatcgggacacaacatgcatatattttcctcttatgtttggttattttgatcatggctttatttatcaaatatgttggcagaagaactataactaaataacagaaaaatacctatactacatgtaaatattcatgtagtataggtattttatttactgtcttttttagctaataatttggctgtttgatgaccaattccagatgatgcccctgtaagtaatataacctttttcattatttttcctcatttccatagttgatagttatattatattttgcaaaaagcgacattaatatgacatcctgcgtcaattaaatagcaattgacgacagttgttgcatttcgaaaaatcgtatgctagtatttgcttacaaaaagtaagtaaataatttaggagttgataaaaatgaatattgaattaggtatctcatcatttggtgaaactacaccattagaaacaacaggaaaagcaattagtcatgatcaaagaatcagagacttattagaagaaatcattcttgcagacaaattgaatattgatgcatttgcaatcggtgaacagcatcgcaaagattttgctgtctcagcaccggaaatcattttagcagctgctgcttcgaaaactaagcaaatccatctttcaagtgctactacaaatctaccaacaattaatccaattagagtttatgaacaatatgcaacaatggatgcaatcgcaccaggaagagttgaaatcatggcaggacgtggatcatttactgaggcatttgatctattcggttatgatttagaaaattacgatgaactttttattgaaaaactagaaatgctactcaaaatgaacaaagaagaaattctcgattggccaaaaggaaagtttacacctagagttgatcataaaggaatttatccgcgcactaaaaagccaatccctatttctgtagctacaggcggaagcatagaatcgactatccgaactgcagagttaggtttgccaatcgtttatgcgataattggcggtgatcctttgcactttaaaccactaattaagttgtacagaagagttgcagaaaaagttggcaatgatttaacgaagatgccaattgctgcacactcttggggctggttaaatcatgataaagacaaagcaattaaggattacttctatcctaccaaattgttagttgatcaaattagtacggaaagaccgcaatggacagggatgacatatgaacaatatcttgaatcggtcggagaaaatggtgcaatttttgttggtgatagcgagactgttgctaataaaatcattaaagttatagaagaacttgggtttacacgtttctacctccacttgccaattgcctcaatgccgcatgaagatgtcatggatgcaattagaatttatggagaagaagtagtgccgaaggtgaagacgtattttcaaaaaaagactgagcaagatcgtcttaaattaaagtggaagaattaaatagagagtaataatatagggttcaagagtctagatgacttttgaaccctttttcacttttagagataaacctaaggaggatgcttattatgattattcgcaccgtaacaatggatgatttaaatgaagtagtagaactggaatctgacgcatttaagatgactaaaaagcaaactgaacaagatatgattggtagaattgagaattatcctgatacttttttagttgcacaagaagatggaaaagtgattggtcatatttttggtcctgcttttaataaacgctatattgaagatgaattatattttgaaaatcatcctaatcaaaaagatgatcgctatcaaatggtcttgagtttagcggtcttgcctgaataccgcaaacaaggcgtagcgacaaaattaattgaagcaatagcgcaagagggcagaaagcaaaatcgtcaagctatatctttaacttgtttaccgaaattgattaaattttatgaaaaacgtggtttttataatgaaggcgagaccaatgatgatattccagatccaactggtgttactagcgtaaatatggtaagggctttgtaaaatgacgcaattaactgaagaaatgtatgcaatttttgatcgggatgaattttcttttaaaaaattgaaatcgcaatattctgaagatgaattagcgcaaataaaaacagattttaaagaaatttggcagacctggaaagaaataaacttaaatgtttatcaaaaattaccacaagataaatttgctaaagttcatgttgaaagttggaccaatggttggaacttacgcgatcattactgggcagcttatcgtttgaatgctttagccgataaaagtccatgcatcggcgtgatgctggataataagcagctgcaggtttatcttatgtttcagcattataagagtgaaaagcgcggcgataatcctgaacaatacaataaattattaactgatcttcctgattgggcaaaagggcggacaactaataattggtacttatgggataaaaacgaaatggagtttgctgatcatttatccttaaatgagtatttaacagatgctgaaaaacagacttcatttaataaggaagcaactcaatccagtttcctattaggaaaatttgcttttagaaagcaagatcaagttgcagatatggaaaacttcatcttagatggtattgggcagctattgtcgttatatcggagactgtaaaatagtttgtgtaaggatgaatgattccttaaatttatttctttaaacattagaaaaaggagttcctttctcgtatgattggtttgaacaaaaaaaacacatacagaaagaagaactccttcatgaatgattttaccaaagattttgctcaagctctattcaatccagacaaaataaatgatttattgcgcaaagagctacaacaggctgttaataacttgctagaagctgagttgactgcctttctaggctatgatccctatgccagaaatggctggaatactggcaattctagaaatggtgcttatttccgcaaggttgatacccagtttggaccaattgaagtgcaagtgcctcgagaccgcaacggtcagtttcatcagcacacgctgcctgactacaagcagcactctgatgttttggaaagcacgattatcaagctatactccaaaggcgtaactaccagagaaatcgctgacttgattgagaaaatgtatggcagtcattatagtccagctcaagtatcaaatatttccaagcagatgctccccaagattgaggcttatcacaagcgcaagctaagcgacaagtttttctgtgtctatttggatgcgacataccttcctttgcgccgagaaacgtttgagcgtgaagcagtctatattgccattggcatcaagcctaatgggcacaaggaggtcattgactactgcattgctcctagcgagaacattgaagtctggacagagatgcttcaaaacatgaagtccagaggcttgaagcaagttgaactctttctttctgatggtgttgttggcatgaaaacagccttggccaggacttatcctaaagctcattttcaacgctgcctggttcatgtcatgcgcaatatctgcgctaaagtacgcgtcgacgatcgtgaaaagatcatgaacgaattcaagcagatacatcaacagacaagcaaaaaagaagctgcagctgtcttgcacaaattctatgccaaatggaataaagcttatagccatgtcatcaaaggtttgaaggaaattgagcccgatctgctagtcttctacaattatcccaaacaaatcagagcttcaatttattcaaccaatatgattgaatcctttaacaacgtcatcaagcgtaaagctaagcctaaggcagaatttccaactgaacagtcgcttgatgcatttattggcatccaggcaatgagctacaatgaccgttatttcaatcgaattcataaaggctttggtcaggttcaggacaccttagaatcctactttgattaaataaataattaaaaaatcaatttacgagaaagatctatttacacaaaagatttgacagtttcttatatcgaaagttagcaaattaaaatacgttaaaattgtattttaaagtgttcatgctacataataaaagtaaatactgctgttattgtttaattaaagggataacaaatgaatatttattcaattattggcatgatcattttaggtttagttaccggcacagtaactagtatgattgttgccttaatttttgtcttcttaggaattgccatgcttgttgtgcatttaattaagtgaaatctatacgtaaaagtaataaggcaaaataacaaattgatattttgggaataagtattgctgtgctatattgaaggtgttactgctccatcattggtgcaattgatcataatccttctgcaggtacagttctccttgataaaaaataaaactaaattcatcaacgttatctaataatgatataatgtctgtgttggattttttagaaaagagataaaaacaaaaatgaatacaatcgcatttaaccaacaattatcagataagttgaacgaagaacttaatccagaattgttctctaccccaggtaagggtgagattacagttgttgctaatgaaaagaaagacttacgtgagtaccgtattattactaaggataataaagtagtcgatgtagtcgatgcatatgatgcagatcatgatgcagcttatcaaaagatgatggatttcttgaagaattaccgttaataattgaattaaactaatgggctagaagcttgataatgagtttctagtctatttttttgccaatttttcttaaaggattagctagatgtagtaataattttgccgttcaagttatttttttaaccacttagtaaaaagtaattgaatattaaaaaaatagcagtaatattaaacataaataagatatttttaatattttaatttgcttggagatgagacaaatgagtattacagagatttttaaggtcaataaagctaaattcattttaatttttctaatggttatcattggtacaaccgttgatgctgcttcgcaatatttgatgaccccggcctttaaccagctaaagaaaatgaatttatttggctttattatttttatttgtttggctattggctgtgatctagttagattagccttgattactagttcagattatttatacggaaagcaatcacaatcttatttgcatcaaattcgtgtaaaaattagtcgctacttttttaaaaatgaaattgcccaaactgctaaagtgcaaaatgaattggttgccaatcttgatcagctaacacagaattatttaaaaccaatcaaaaacggttttatgtacttgttgtctgtgcttttctcaattggaattttgttttcatttaactggcttttagtagtaatgacggtgattttaactgcaatttcattatttttgcctaaaacttttgaaaaaatgacttcatcggccacaataaaggttactaagaaaaatgaaaagttcttaaacactttagccaagtggatgagtggtctggatgaattacgaagatatgccagttttaatatatttagtgaatcagttaaccaaagcgcagacgaatataaaaaagcagctattcatcaaggagcaactattgctattgcagatatgatcacctttgtagttaatattgtgggacaaatgctcttgatggttttatgtgcttacttatatttgcaaggacaaattgtttttggtgcggtaattactactattcaatttagttcaactgtaatgaatggtgtttcagcatttgtaacggaatggaatttaattaaatctaccaaggatttgaataaggaaattactaatcttcaagctccagtaaaaatagctccagatcagcatcaagttaagaagattaacaggctagaagtaaaagatctggccttacaattcaaaaatggtgagtatttatcttacccagattttacagttaagcaaggtgaaaaaatcttgcttactggtgatagtggaactggcaagtcaactttatttaaattaattttaggtaaattaacgcccagccaaggtgagatcattttttttgatcataatggtcaaaaattaaattttgatcttgatgaattaggctatattgctcaagataataccttgtttcctgacacaattgccaataatatcacgatgtttaatagtgctttaaataatcaaatttcaggtgtattagatcaagtaggttttaccaaggatttggataagatgtctgctggacttaatagtcaaattgatttggataaaggaaatttatctggaggacaaaggcagaagcttgtgttagccagagctttgattcatcaatcaccttggctattgattgatgaagggactagtgcaattgacagtgctgggacgaagcaagtattacaaaatttattgaatactccaagtactgtaattatgattgcgcacaattattctacagaattagtttcaatgtttgatcggcaaattaaattgactaatcgaggtgacgccgaatgagtttcaaaggctttattaaaactaattatttaagatttatttacattaatattttatcagttatttcaggtgtcgctgctattggtgcaggctacattcaaatgtactggctgacttatatcaaagatcgtgcttgggtgaagattttacttgcgacggctttaatggggattttatatttagctgctcaagggatgatctattatatccaatttgtaattcgagtgcaggaagaagaatataataaaaaggtgcgcgctcgtttggctacacattactttagagatggtcaaaatcatcaagtaccggccgtgcaaaatcggatgactaatgatttagaaatgattagaaaaaattattttgattggtatccaattgtgccgttctatggctcaatgtttgttgcggcattggtggctctacttacaattaattggtcaatctttttgactagtgtagtgattgatattgtttcttactttgtacctaaattagtacaaaagaaaatggaacaagcaactaataatgtttctgagcaaaataagcattatctagatgttttagctaaatggttctctggcttagaagaattaagaagatattttgctggtgctaagttatttcaggtaggtgaaaaaacttcaagtaaagtagaacaggctcatgttaaacaaacggctgctcaacagcaattaattattttgaatgggatctgtaacatggtaggacaaataatcctgttgtctttgacggcttttttgatcactaagaatttagtgatttttggtgcaattatgtctgtccaaaactttgcagctaatatttcgatcggcttacaacaaacaattcaggcattaagttttatgaaatcgtcacaggatttaatgaaacaagttgatggtgatgctactgtgattgaaaaagttaaagctggccaagaagagacaccagtagcattttcaacaaaagatttggctttgcagtatcctaatggtgaaaagcttacttttcctgatattgcagttaaacctggtgaaaagatcttattaaccggagattcaggtgcaggtaagtctactttatttaaattgattttaggtgaacttaagcctagtgcaggtaaagttgaatttcaaaatagtcaaggtttgacaattaagcctaatatgtcaagaataggctatattccacaagagccgaacctatttccgggtacaattaaagaaaacattacaatgttcaacaagcaacttaataatcaagtagctcaagtgcttgatgaagttaattttgcggccgatattaaaaagtttaaagcaggtgtcgatgaaaaaattgacttggataatttgaatatttccggaggtcaacgacaaaagatcgtattggcaagatcgaagatccatggtagtgacattattttgattgatgaaggaactagtgcaattgatcagacagcgactatggatattttacaaaaattattaaaaagcaagaccacaattgtctttattgctcacaattttaataaacagatgcaggaaatgtttgatcgcgaaattcatttaataaaagaataaaaaatcaattagagaaaaaactcccaaatattaatatttttaatttgaaccttgacaaaatggtgatttaaccagtaaattaattgcggattattaattaggatagattaattattggagttgtgaaaattgaataaaaaatctaaagctcctcaactcaaacgaacaatgacagcaggtcaaatggaaatgatctctcttggcggtgctatcggtgttggtttgtttatggggtcaacctcgactattaaatggaccggtccgtcagtattattagcctacatgtttgtggggttgattttatatattgtaatgcgggcattaggtgagatgctttatatcaatccagggacaggttcatttgctgattatgcaacagaatatgtgcatcccttagcaggctatttagcgatgtgggccaatgtctttgaatatattgtagtaggaatgtccgaagtagtcgcggcaactgaatatctgaagtattggtggccgaatatttcggcgctgtggtcggggatcatcattattgcctttttactactagccaatttagctagtgctaaggcttatgcatcactagaattttggtttgccatgatcaaagtaataacgattattttaatgattattttaggctttatcgttattttctttggtgtaggtaatggcggccacccaactggctttagcaatttatggtctcacggtggtttctttacagggggagtaaaaggctttttcttctcaatgtcaattattgttggttcatatgaaggcattgaattattaggtatctctgctggtgaagtagctaacccacaaaaagcaattatcaaaagtgtcaagtccgttttgcttagaatcctgattttctatgtaggagcaatttttgtaattgttacgatttatccatggaataaattaaatagcctgggttcaccatttgtaaccacttttgctaaagtaggaattactgcagctgcttcaattattaacttcgttgttttaacggctgctctttctggtgctaactcagggatttattcttccagcagaatgttgtttaagctgtctcatgaccacgaagcaccgggaatttttaagcatatttctaagcgaattgtacctgatcgtgcaattatggggatttctgctggtatttttattggttttgtcttgaacgtaattgcttcacaatttaatcattcagctagtgatttatttgtaattgtcttcagttcatctgttttaccaggaatgattccttggtttgtgattttattagctgaattaagatttagacggcataacaaagaagcgatgcaagatcatccatttaaattgccgttatatccattttcaaattactttgcctttgcaatgttgataatgattgtaattttcatgtttatcaatcctgatacgagaatttcagttatcgcaggggcattagtcctgattgtggcaacaatcgtctacttagttagacacaaaaatgaatttaagaaaagtaattaaggtgattattcacctttttatttttatctaaaaacactaaatctatggtttttcattatctaacatgcaagatctatggtatgttagaagaaatgttttttgaaaggtgaagataatggcaattcttgaacaaccatatttggatttgttagaaaaaattatgactgaaggacatgacaaggatgatcgaactggtactggaactagatcatattttggtgcccaaatgcgttttgatttgacacagggctttccacttttaacgactaagaaagtgccgtttggtttaattaaaagtgaattattgtggttcttacggggcgatactaatattcgctttttgttagagcataacaattatatttgggatgaatgggcctttaaaaattggattgaaagtgctgaatatcagggggctgatatgacagattttggcttgcgtagtcaaagtgatccagaatttaatcaagtttatcaagcagaaatgaagaaatttgatcagcgcattcttgatgatcctgcttttgcccagaaatatggcaacttaggtgatgtctatggggcacaatggcgtcattggaaaaagcggacaggcggttttatcgatcaaattgctgacgtgattaagcaaattaaggaaacgccagattctcgtagaatgattgtcacggcctggaatccggaagatgtgccaactagtgctttgccaccatgccatgtcatgttccaattttatgtagtcgatggcaaaattagcgtgcagctttatcaaagaagtggtgatatgtttttaggcgtgccatttaatattgcttcatattcgctgctcttgaacatgattgcgcgtgaaaccggcttaaaagtgggtgaatttgtacatactttaggggatgcacatatttatcgcaaccactttagccaagtaaaggaattgctgagtcggacgccatatgattcacctgaattgtggcttaatcctgaaaaaaagcacattgaagactttgaaatgaaagatatcaaagtgctgaattatcagcaccatggcacgatcaaggcaccggttgcagtttaggaggtctcaatgttaagttttgtttgggctgaagatcagcagcatggtattggcatcgatggccatttgccttggaatctgccggctgacttgaagcattttaagaaaaagaccataggtcatccgatcatcatggggcgaaaaacctttgcgagtttgcctcacttgttaccagagagaaaacatattgttttaactcatcgtcaagaattaaagcaaaaatatgcgggtaatgagcaagtgaagattgtgtccacattagctgaattaaatgaatatcttcgtcaacatcagactgaagaaatctgtgcaattggtggagtttcaatctttagggcgttacttgatcaagttgatcttttagaaaaaacagagatcaaagctaattttaaaactgatacagtgatgccagcgattaactatgatgattttgaattagttagtcgcgaagagcatcatcatgatgaaaagaacaagtatgactatacttttttaagttatcatagaaaaaataaataattgttaaaaagtctcgcagagttgcgtggcttttttatttttcgctataatggatgaaagtattttcagtataggacagaaaattatgacagataaacaaataacgggattaactcaagctgaagttgatcaaagaattcaaaatggacaggttaatcaagccattgatgaccagtccaaaacagctactcaaataattcgagaaaatgtctttacttattttaacttgatttttgctattttggctgtgctattggtgtttgttggtgcctggaacgatctgacttttttaccagtgattgttttaaacacgattatcggtattgtgcaggagcttcgtgctaaaaaagttttaagcaagttaaacgtgatgaatgcgacggaaattatcgcggtgcgtgatgggcaagaagaaaaaattcccatcgaaaaattggttcaagatgatgtcattcttttacaaactggtgaccagattccagctgatgcgcgggtaatctcaggtgagctgcgggttaatgaagccttgttgacaggtgaatctgatgaaatcactaagactaaagacgcagaattaatgtcaggttcttttgtagtttccggtaaggcttatgccgtcttagaaaaagtgggtaaagactcatatatttctaaattaacgatcaaagcaaaggcaatgggcagtgttgaacaatctgaaatggtgcgttcaatcaatcgtctggttaaatgggtcggcatcatcattattccggtgggaattgccctatttagtcagagtttctttttgaataatattggactcaagcgtagtatcacttccatggaagctgctttaattgggatgattccagaagggctatatttattgactacgattgccttagctctagctgctatgcgattagcgcgacaagaagtaatgctgcacgatatgaagagtgttgaaactttagcccgagtaaatgtcctttgtgtagataaaacgggaacaattaccgaaccgaagatggccgtagaaaaagctgttagtagcaagaattttactggtgatttaagtagcatcattgcggattttgctaaaaacatgccagctgataacgcgacgatgaaggcgattcaagcctattttaaagatggaaccaaaacggcggatagcgttttgccttttacctcagtcaataaatattctggtgtaatttttggcaatcagacaactttaattggtgcgcctgaaatggttttgcgtgatcaatttgcgcaatatcaaactgaatttgaaaaatatgcggcagaaggctaccgggtgttgattgcggctaattatcctggcgtattaactgaagataattccgccttaaaggaaaatgtacaagttctcggttatattttattgtcgaatccaattcgtaaagaagccaagtcaacttttcaatattttaaccagcaaggtgttgatatcaaggttatttctggggataatccggtaaccgttgctcgagtagctaagcaagctggaattaatggggcagataagtatatcgatgcgcaaaccattaaagatggtgaatatgagcaggccgtgcaaaactataatgtctttggccgggttaagcctgatcaaaagcgaaagtttgtcgttgctttgcaaaatcaaggtaataccgtagccatgactggtgacggagttaacgatattttagcgatgaaaaaggcggattgctcaatcgctatggcttctggtaatagtgctgcagtgcaagcttcacaagtggttttgctcgattctaattttgctaaaatgccgttagtggtgaaccaaggcaggcaagtagttaataacattcaacgttcagccagcttgttcttggtgaaaaacattttttcattcttgatggccatcttctctttgattatgacaatcaattatccgctgcagccagcccagatcacattgatctctgcatttacaattggcttgccgtcgtttttattggccttagaaagcaatcacaagcgaattcgtggaaagtttatgccaaatgttttagctcgggcaattccagggggcttaacagattggctggcagttgcaattttagtcattgcaggggcctctatctcacttgatcatggtcaggtaggcacgacagcgactatgttgctagtcttagttggttttatggtgatgtatcatatttcggcaccaataaacaaatttagacttgctgttatgggcttatcagttatctgtattattggctcaactatctttttccaaagattgttctcattgacaatgcttaataacaaatcattatttattttggcggtcttattctgtgcggcagtgactatctttagatggttatctaaaattttggatggaatcgccgaagtgttggttgtctttgatcaaaaaggaaagaacatgacttttgtggaattcaaggaagcatatgatcgtggcaaaaataatgtgaaataagaagataatgaaaaagccagagttttgctctgacttttttactaccttaatgattttcgatatccagcagcttgtgcggcagcttcactgttgaagtaaactgcattagctgatgacatatgataattttgcccattcattacatggtagatcttactgcgacgattgccaacgactcggtgttctgcagtggatacagtacctttgatatggtgaatggttcgtttcttggttactcgagaagtggatcgttttctagattttacatgttcagcaatagtactagacctatgtttaaccttagaagtaccggtcttgtaattaagcaacataccaggttgctcattaaaaatgtagacattaaagcgaggcccgtttttgctagttgcttcggcttccatttcaacgccgttagctaataggtcattccctttaaatattggagtaacccgatagcggacatagtttttgctcgaactacgtaaatattcagcaacctcattttcatatttaagcatatctggatcatttaattcacgcgtaccggtaatcaaattgcgtggattgttgttttgaccagtcaactgatagccgattagatggcaccgattatacaaccaaccactagcgattcgtttattatgccagccggtcggattccaagttaaagccgcacgctgactatgtggcattaatcttttatttagtaaagcattagcagcatgagctcggttcaaataatctaattggccatatttttgccatggaccttttttcttgctcagtgtactcttagaaaactgcggctgatcatgatcaacggtcacaatttctttgttgtggtatttcaaattgactaatgctttatctgaaacagcatagacggtttgattgttgcatgggacattagtattagcaaaagaaatgaatccaattgctgcagctaatgagagagcaaaacttcgaaagcgatttttcttcattttttctccttagcaaaaataaattatttaactatatcctaattatacaatgaaatcgcttttatctaataaaaattaaaaaagatgttgactagattaaaagaagatgataacttatttataacaaatcaagaaaacaacatcttgaaggactgagtaactagaacttctattgataaagagagccagcgtggtggtgaaagttggcaaataggagctagtgaatatgggtttggaacgatgaccggtggtgatatttagctatcggcggggctgcatccgttaacagtgcaggctattttttgatagccagtgaggttgattacgtaagtgatcagcgaattaaaggtggtaacgcgagcactcgtcctttggggatgggtgcttttttatttttatcaaagtaggagtgtattttatgagaaaacggagaagaagaaataccattatttggacgatcattgggatactgatcgtgattgcaggttggtttagttttggtccaggaattcccagtcaaaatcaggcaaaaactgttacagtcggaatcgttggggaaagtaaagccgaagccgcaatttggaagtcaattgctaaaacggctaaggaaaaatatggtattaccttaaaaactaagaactttacggattacaaccaacctaacaaggccttgaagtcgggcgatattgacatgaatgcttttcaacactatgccttcttaaaggattggaataaggcaaatcacggtggcgttgtcgccattggtagaacctacatcgcaccgatcagactttattcacgcaagtatcataaattgagtgacttacctgatggtgccacgattgcagtgcctaacgatgctactaacgaatcaagagcactgtttgttttgaaaaatgccggcttaattaagttgaagaagggtaagaccttagttactgtagctgatatcaccagcaatccaaataactacaagattaaggaaatcggtgctgaacaaactggtcgagtattgaattcagttgacgcttctgtagtaaataatgattatgctggtcctgctggcttgactgataagcaaacgatttacattgaaccaattaacaaagattcaaaacaatggattaacattctttgtgtcaaacaaggcaaacaaaaggacaagctttaccaagatgtcgtcaaggcttaccaaactgcagaaactaagaagctaactaaggaatactatggcaatacgcaaattgcagcctgggacgttaagttgaagtaaggaggatcaaaaatgagtattgttgaattgaaaaatgtagaagtggccttccctcagaagaagggcgaaccagttaaagcagtgaataatgtttctctttccattgaaaaaggcgacatttatggaattgtaggcttctctggtgccggcaagtcaactttagttagaacggtcaatcttttacaaaaaccaactgccggtagtattaccgttgatggcactgaatttgttaaagatggcaagcaggtgatttctaataaagaattgcaattaaagcgcagaaacatcggaatgatcttccagggttttaacctattaaatgaaacgactgtattagaaaatgtagcctttgccttaaaacatgaaaagttgagtgatgaggaattagaaaaacggtcattggaactgcttgatctggttgacttaaaagataaggctgacttttatccagctgaattatctggtgggcaacaacaaagagtagcgattgctagagctttggctaataatccagatattttgatctctgatgaagcaaccagtgccttggacccacaaaatacgcaacaaatcttggacctgcttaagcgtttgaacaaaaagttccacttaacggtcatcttaatcacgcacgaaatggatgctgttaagaagattgccactaaggtcgccgtcatggaacacggcaatgtgattgaagacggcagtttgcgagatgtcttcttacatcctaagcaggatttaaccaagaagtttgttggtggatcacttgaagcgatttctactttgaattcattggcgcttgataagcttggcaaaaatgaagcaatttatcaattagtttacagcgtagctaatgtgactaaatcaatcattattgaattgtataagcaaattggcgtagaagtttcaatgctttatgggaatgttgaacttttgaatgaagagccaattggtactttggtggtattggtgaaaggcgatccagctaagcaaaagcaaacacaagaatttttggctaagcaaaatgtgacatttacacgtttagatgaaaaggggaatgtatatcatgattagtttcttaagtaaatatttacccaatgttgttcaacttggctggggcggagacgctggctggggcactagtatttttcagaccttatttatgactttttggtcagctatctttggtggcattcttggtattatctttggcgtgattttagttttaactaaggatggcgggattcggcccaataaattctggtacaatttctcagataagctagtttcaatcttcagagcgattccgttcattatcctgcttgcctttgttgcaccagttactcaaaaaattgtaggtacacagatcggaatgaaggcagccttagtaccattaactttaggcgtatttccattttatgctcgtcaggtgcaagttgctttagaaagtgttgacccaggtaaggttgaagccgcagaaagtttgggctcaactgcgcgtgatattatctttgatgtttatttaagagaatctcgctcagaactgattcgtgtttcgacggtgacgattatttctttgattggtttgactgcaatggctggtgctgtaggtgccggtggtttaggtaataccgctatttcatacggttataaccgattcaataatgatgttactttagtagctactgtattagtaattattttgatttttatcgttcaaatcattggtgacttctttgctaaaagaatgaatcaccagtctagataaaactatgatccaggaaaaatcctgggtctttttttggaatgaaattgaaaaagaaagcctttacaggtattataaatggtgattgataattaacgcaaaccttatagagcttaataaggaggaatataatatgagcgaagaagaataccgtgttgaaagtgacactattggtccagttaagatccctaaaaatgctttatggggccctcaaactgaaagaagccgcaataacttcccaagtggtgaattgatgccattgcaaattattcgagcatttttacacttaaagaaggcagctgcagaaagtaacgttgaagttggcgatgaaccaaaagaaaaaggcgaagcaattgaagatgcaattgatcatttgctagctttaagcgatactgacttgcgtaaggacttcccacttcatgttttgcaaaccggttcaggtactcaaagcaacatgaacgttaacgaagttgtagctaacttggctaataaattgcacccaggtttagatattttgcctaatgatgatgttaaccgtggtcaatcatctaatgatacttatccaactgcaatgaatattgttgccgttgaagcattggacaagttggaaccagcaattcaacacttaattgatgaattagttgttaaagaaaagaaatattggaagactgttaaagttggtcgaacccacttacaagacgcaacgcctttgacttttggtcaagaattatctggctatatttctgctcttaaacatgacttatcatatattcgtgaattgaagccaactctctacgaattagctattggtgggactgctgtagggactggcttgaatgcagcaccgggaatgaccgaaaaaattgctggtaaattatcagaagtctatggtcataaatttgaagttaaaactaataaattctggggcttagctcaccattcaggtcttgatgtagttcatggtgcccttaaaacattggctgctgatatgtttaagattgcgcaagatattcgtttacttgcttcaggtccgagagcgggctaccatgaattaaatattccagcaaatgagccaggttcaagtattatgccaggtaaagttaacccaactcaggcagaggctgtgacaatggctgctgctaaagtatttggtaatgacaccaccattacctttgcttctagtcaaggtaattttgaaatgaacgtcttcaagacagtcatcattgcatcattcttagatagttgtgatattttaactggtacaattactggttttgctgataaaatgattcatggcttaacggttaatgaagaaagaatggatgaattacttgagaattcattaatgaccgttactgccttgtcgccacatattggctatcatgctgctgctaagattgcgcaaactgctgataaagaaggcactactttaagagaagctgctttgaagagtggtaaagttactgaagaacaatatgatgaatggatggactatatgcaaatgactaatgttgataagtctactccagaagaatagggaaagtaagaaatgccaaatacaaaagaattaaagaataaatatgatgctatcgttgttggctcaggcggagcaggtctgactgctgcacttcaagctcatgaactaggtctaaatgttgttgtgcttgaaaaaaatgagaaaactggtggtaacactagtcgtgcttcaagtggaatgaacgcttctgaatctttggttcagcttgacgaagggatcattgataataaccgtgacttctatgaagaaactttaaaaggtggaggtttattaaatgaccgtgccatgttgaagtactttgttaaccactctgctttagctatttcatggttgatgaaatatggtattcgtttaactgatttgaccattacaggagggatgagtaagaaacgtgctcaccgtcctgcttcaatggaaccagttggattttatctaacttcacgaatgacaacacaggtgaaaaaagcgggtattgacatctttactggtgctaaagttaccaagttgttgcaagatgctaagaagcgcgttaatggtgttgaagttgagacaccagatggcattaaaacagttaaagctaaggtggttcttttagctactggtggctttggtgcttccaaggatatcattaagaagtatcgtccagacttagttgactataagactactaatcagccaggggctacaggcgatggactgaagcttgctgaagcacttgatgctcaactaatgcaaatgaacttcattcaggttcacccaactgcagatactgataatccgcatgtttatttaattggtgaaggtctgcgcggtgaaggtgctatcttagttaacaagaatggtcaacgttttgttaatgaattaagtacacgaaagattgtttctagtgcaattactaatttgcatgaagatggggcatacttgatttttgactcaggtgtacgggctcattttgctgcagttgagttttatgaccagattggtttagtagaacatggtactgatttggctgatttagctaaaaaaattggcgtaaatggtgccaacttagaaaagaccattgccgcttggaataagtccgttgcaactggtaaggataaagaatttggcagaacgactgggatggatcgtgaactggatcgtggtccatactttgcaattcatgttcatccagcaattcactatactatgggtggtattcatattaatactgaaactcaagtacttgatactaatggtaatgtaattgatggattatttgcagctggtgaagtatctggcggacttcatggaaataatcgaattggtggtaactcaattgccgaaacagttatttttggtcgtcaagcaggtattcagatggctaaatatgttcgtgaaagtaaataatataagaaagattatgtaaagagagcggttggttaactgctctttttcgatagaaataataacactggcgagattttgatgggatattataatttataattatggaataaatcgtgtctaatgaaagcgcttagtgtataattaatcatgtagataaaaaacagtttataaacatttgaaaggactaatttaacttatgagtagaaaagtatttcttgttggtgatggtgctgttggttcaacttttgcaaatgacttattgcaaaatacaattgttgatgaattagcaatttttgatgtagctaaggatcgtcctgttggtgattcaatggaccttgaagatattacgccatttatgggtcaaaccaatattcatcctgcagccgattatagtgatgctaaagatgctgacgtttgtgtgatcactgctggtgttcctcgtaagccaggtgaaactagacttgacttggttaacaagaacgttaagattttggaaagtattgttaagccagtagttgaatcaggatttaatggtgtctttgttgtttccgcaaacccagttgacattttgacgactttgacccaaaagttgtctggtttccctaagaaccgtgtaattggtactggtacttcacttgattcaatgcgtcttcgtgttgaactttcaaagcgtttgaatgtcccagttgctaaggttaactcaatggttcttggtgaacacggtgatactagttttgaaaactttgatgaatcaacagttgctggtaaggcactccgtgattactcagaaatcaacgatgatgttctagcagaaattgagaccgatgtgcgtaagaaaggtggcaagatcattgccaacaaaggtgctacattctacggtgttgcaatgatgcttactcaaattgtctcagctattttggacaatcgtgcaatttgtttgccactttcagctccgattaatggtgaatacggtattaagcatgatctttacttaggtaccccaaccgttattaacggtgaagggatcgaaaaggtaattgaaactaagctttccgatactgagcatgctaagatgattaactcagcagacaagatgcaagaagttttgtcaggtataaacctttaattgatcattaattttattaaaagccctagttgtcaaaaactaggactttttcttaatgacaaaaaagctagaaaatagtattatataagaaaagattaataaaaaattaaaagataagaattaacgaggtatatcatgacagttatttcacaacaagaaattgaaggcttttctgaaagctttaattctaatcctgagaataaagtagcttctcgtgctgctcgtcgtagtggtttgcttgaagcttcatttaatgaccgcgtatcagaacgacttaaccatgtcttttcaactgaacttgatattggcggtgtaactgatcagaagcattctggtcgttgctgggaattcactactttgaatgttttgcgccactactttggcaaggaaaacaaggtcaaggattttacgttctcacaagcttataatttcttctgggacaagattgaacgtgctaacgctttttacaatgcaattattcgtttggcagataaacctttaactgatcgtcatgttcaagcatggcttgagtttgccggtgaagatggtggcctttggaccatggccattaatttagttaaaaagtatggcgtggtaccttcatatgcaatgccagaaagctttaatactaataatactactgctttagccgaaaacttagctcgtaaggagagaaaagacgctcttgttttgcgtaaattagttaatgaaggcaagagggatgaagcagaaaagaccaagaaggaattcttgaacgaaatttatcgcatggtatcagttgccttgggtgaaccaccaaagaaatttgatttggaataccgtgatgatgataagaagtaccatttggagcgtgatttgactccacaagcatttgttcaaaaatactttaaggacttcaacttcgatgattatgttgctttatccaacattcctaaccatgaatataacaaggtttaccacttgccactttatgacaatgtggctggcggcgatcaagtcaaatacttgaatgtgccaattgaatacttagctcaagctgcagtagctcaacttaagtcaggtgaagcagttagctttggtaacgatgtcttgaagcaaatggaaagaaaaactggctttttggatactgaattgtacaagactgaccaattatttgacgttgatacgcaaatgagcaaggctgatcgtttgaatactggtgagggctttgctactcacgatatgactttagtcggtgttgatgaagacaacggtcatatccgtaagtggaaggttgaaaactcatggggcgacaagtttggtcacaagggcttctacgaaatgagtcaagcttggtttgaacaatatgtttacgatgtgattgtgaagaaggaatttttgccaaaggaattgcaagagttagttgatcaaccggctgttgacgtaatgccttgggaaaactttggtgaataagatcaaaataacaaagatcaagtaaagtgtctgggaaaaaactaacccttagatactgaaagacgatcaatccaactcttaatttgagttgcttgaccgtctttttctgtctatttttatttttgaacaaagaaaattggtcttttgaccatcttctgttccaatatttgcttaaattcatcatcatgaaggctattcctatatctgtttcaaccttctttttgcctcttaaatgagttcggcgcatgccaaagacgttcttcaaatgtccaaaaatcggctccacatcatatttcctcatgctgtagatgtgtctgccttcaggactttggagaactgctttggctttttcttttaggtattgccagttaggattatagcgaacctgacgttggcgtccgctcttagtcttggctaagcgttctaattctggcgttagttgaaattcatctgcttcatagaccttaaaatcacgaacctgaccagtcgatcgatctttacgttgactataatatttgaagttgaatctgacgccattttgatcaaggtaataatcatctttttcatcatagaaccagttagccagcttagtcggatcgttgcgatgctttctggtcttttccttttcgtacatggtataaggaatatagtacttcttgtctgaatactcttcttctaacattgaataattatattcgctgccataaccagcatcagcgacaatcttgtcaaacttgtctagtgtcgtcatctgctttaaaaatggttcgaaagttctgaaatcagttggattagggtataaagcaaagtcaaccacatattgatcagtggtggcagcttgaatattgtagcctggcttgagctggccgttcttcatgtgatcttccttcatatgcatgaaagtcgcgtcatgatctgtcttagaatagctgttacgccctgcaaagatttctttcgcctcttcatatttcttcattcgaggaacatagtcttttcttagtttatgaagcagctttttaagaccgcgtcttcttgcttttctaggcgaaccgccagggattgctttgggttcttgctcaatttcttcggtcagcttttcaatctcggcttccgtttcttgtgctagctctgccaaaccttgactggtctggactttctcttttgccattgctttgacgacttctttggcaatcaattcatcataaagctcaaccgcttgacctttgagcttgtcatgaaatttttcaactgccttgcgccaaacaaaagtatagcgattggcgtcagcttcgattttagtgccatcaataaagatcgctccttcattgataaggccctcggcttctaacaaattggtaaagtagaggaagcttttcttaaccagctcattggcatgcttgctggatctaaagttattgatagtatggtaagaaatctgttggtgttcagccaaagccatcatcggcacgttttcttccagcattaattcgatttttctgcctgaaaatactcttctggaataagcaaaaagcaagattttaagcatcatcgctggatgataagctggacgaccggttttagcagtattacccaataagacatcttctggaattgaatcgacaaaccagctaatggtattagccaaatgattatgaggaatagcgaagtctaagttgagtgttaaagctgtttgacctatggtataattttgatacattaagattgccttctttctttttgttttgtggtgattcaataatatcaaggaaggcacttaaagtatagaaaaagaacgatgaaatccattaggaaatcatcgttcttttttcctgtctgagaattagttttttcccagacactttttttgcataattatttgagtttaaataattcaaaaaataagtaaaaaatcaaaataattcaaaatttgtaaccgcttaatctgttgataagtgtataatactaattgtgagttgtgatgagttttagtttttataaaaaggcttgtttaacaataacaagatagattagggagcataaagaggggagagctactctatgcctgtaggaaaaagaatttatttaaagaggcaaatgcctgatccaaaagttgtagctggttttaaaaagatcccagcttctaataccgcggattgcatggaacgaaattgtgctatgaatcctagaattaagttaatgtcgaatcctgatgaggaaatggttggtccagcatttacggttcacaccagggcgggtgacaacttagcaatttatgcggctttaaagtattgccagccaggcgatgtgattgtcatcgacgacgagggtgataacactagatctttgattggtgaggtaatgatgtcttacttacgcgatcaaaagaaaattgcaggtattgtaattggtggcccaattcgtgatattgataatttaagaaattggaaactgccgatttatgcaaccagtactaccccaggtggaccatataaagaaggacctggtgaaataaatgtacctgttgcttgtgggaatgttagtgttaacccaggtgatgtgattttaggggatgctgatggagtaatttgtattccacgtaaagatgctcctgagattttgcctaaggcacaagcttttcatgagcaggatgaggctaaagcaattgcctttagcaaaggagaagttgatttaagttgggtagataaaagcttagcagataaaggctttgacatcattgatgatgtgtatcgtccatagagaataggggattcttatgaaaactttagaaaaagtgaattataaaggctttatttggcctttgatcgttggaattgtattgtggtgtattactccatggcgcccaagtggcctttcggttcaggcatggcaaatgtttgccgttttcgttgccacaattgtagggtgtattacaaaacctttgccaattggtggtacaaccttagctggcttggtagtaactgttttagttggcttagcaccaatgaaggacgttacaaatgcaaaaggtatggtagttaatcaaggcgtgcttagttcatttggtaactctgctgcatggttaatcgctatggccttcattatggctcatggtattagtaaaacaggtctaggtaaccgtattgcctatattatgattcaaaaatttggtaagaagtcattgggtattggttatgcgattactggattggaattaattctcggtgccttaattccatcgaactcagctcgtacgggtggggtcgtttggccagttgttgaatctgtttcaaaagaaggctacgattctaagccagatgatgcttctcgtaaaaagattggtgcctacattgactttactgcctttcatgccaatattttatcaacggctttgtttattaccggtgctgctcctaacatggtggctcaacaattagccgcacaaaagggctatcaaatgtcttgggcaggttggtttttcactgcaatcgtacctgttgctgtattggcagtaatcattccatttgttatttacaagatgtacccacctgagattaaagaaactccagatgctaagaaatgggctgatgaaaaattagcaaaaatgggaccaatgtcaactccagaaaaaattatgatgtcagtcttcattctttcaattgttttatgggttttgtctagtttctttaagatcccacaattagatgcgacttttgttgccttcctggctgtaactattttgatgattaccggtgtgttaacaatgcaggatgctctgaaagaaactggtgcttggaatatcttgatttggctttctatcctgatgttcatggctggtaagctgatttcatacggatttattgattggttctccaaattagttcaaaatagtcttcatggtgttagctggggctttgtattggcaattctagttttgcttttgttctacacccactacttctttgcaagtggaactgcacatatgactgctctttatttgccattcttgtctgttgcggttgcaactggtgctcctttaggcctttccgcaatgcttttagcctttactggtgcaatcaacgcatcaaccactcactatgctaatggtcctgccacaattttggctactactggctatgttaaacaaggtgaatggtggaagatgaattttgtccttggattaatctatatgattatttttggaactgtcggagttctttggatgaagattattggtttatggtaaaaaaaagcaatctggaatcacccaatgtcattaagttaagacattgacaattaagggtgcttttttagagatcgaatcatttggattcgatctctttttttgtataaaataaaggcgaaaagaccagccttttcgcctatcttatatattatatattttaaaccttcaaaattattgccagaaagatggtgttaattatgaaagcccttcataagaatattctagaacgtcttgatcaaattatcaataatactggggatcatattcacgattttattaataatcctcatgcttttaccaggaaacgcactttagatgcagcgacagtccttaaaactacaattaacatgcaaggtcagaatttaaacagtgaactctttagagcttttggcgaagatgcaactaaaaagaacgataaagtagttagtacttctgcctatgttcaacgcaaaagccagctttctcctgcttgttttaaacatattctgactgtttttaatcaaaatctatttaatattcaactttttgatcatcactaccgtttgtttgccattgatggctctgactttaatcaaatctggaatccgaaatcgaataacattgtacaagcttcttctcataaaaagaaaccctattgtcaaattcacgttaatgccttatatgatctattgaataatacctaccaggattgtatttttcagcctaaatcagaaatggatgaacgcaaagcggctgttcaaatgcttaaagctttgaattgtggtccatatattgtaacaatggatcgtggctacactagtttcaatatgattgaaaactgcaatcgcctgcctaactgtcattacataatacgaactaaggctggacaaggcggagttaaagaaataacgacattgcctgatcaagaatgtgatcgtgagatttcctgcctggtaactacttctaactattactacatcacgcataaagccagtgagaatattcaccatgtccagcatcattatcgccaatatattaagtatcgctctaaaaatacccaggatctaagctgggattttggcgagttatgcacaataaaatttcgagcctgcaaatttagaattaatgatgccaaatcaggcaaagaagaatgggaagttgtgctaaccaatcttgatcgaaaaaattatccgctaaaaagaattaaagagctttatcatctgcgttggggtattgagacctccttcaagaaattgaagtattctttaggcagtgtacagttccattccaaacaagataaatttattgaaatggaaatttatgcccatatgattatgtttaatgcaatcagtcaaattgatgcacaggcctatattccgcaaaagcattgcaagtatcaatatgccatcaatttcaagcaatcatgcttgattattcagagcatgtatttggcttcttctttaacgcaagattttgaacggatccttattcagatcagctattataccattccaattagaccaggccgcaaggacaagagaaatattaagcccaaatcagctgtatattatttatatcgcgtagcttaaaaaagcagaatctgtgctatgccttatttgttgtacgaaaaaagcaccaatttaaccaattaaatgttaaatcagtgctttaaaagtctaatattaattgtcaatgtcttaacttaatgacattgggaatcaccaggttgctttttttgcgtcataatagaattgagtaatcaaaatgaaagaagattaaagatgaaatttaaaactaatgacgatgtaattttgcattataccgatacgggggatgaagataagcctgctttgattgggatcccaggtatagggggatcttgtcaaatgtggcaagatttaattgccttatttaaaaatgattatcgttttattatgcttgatccacgcaatcaaggacagtccgaacgaacctatcgtggacagcggattagtcgtcatgcagttgacttagaggagctattagttaagctcaatttgcatgatgtagtagctattggaaattccatgggggccgccaatatttgggcatatttgtcaatttatggcaaaggtagactaaaggcaatggttgatttagaccagtcaccaaagatgattgcggataagagctggaagtatggctttaaagacctaacttgggataattatcctgacatgcttaaatttgattttggcaaggctttttaccatcacattgatgaaaaaatgtttttggctgctaaaaaggaatatcaagaattcccatatgatccagccgaaaactataactgtttagttgaacatgcggagcaagattggcgtgacatgattttggatacgccggttcccctgctggtaattgctgggggaaaatcgccattttttaatccagaatttacccaagcgataaaaatgctgaatcaagatgttcaaacggcgattgtaccggaatgtgggcatttgcctcaggctgagcaaccagaaaaaacgcatgagattattgctgaatttttgaaaaatttaaaaaattaatagataaattgaaataatcaaactaagagagtaaactatatttgtgaaaacgattaccgaaatagcaaggtggcatatttatggataaagtcgttgatttgtttttaaacgacgctacaactaggcaaaaatgggaaaacttgttggaatcattggggttaaatgattttagtgaacgcgaagttaacgtgattgatcatactattgggctagaagatgaggaaggcaatttagttggtactggtagtgtggctggtaatgtcttaaagtatatcggagtcaagaatgatgccgatacgcagggggctcgctttaataaagtggttacagccttaacgcaatatttgactaatgatggaattttccattcctttgtctttactaaagcaaagtatgcaactagctttgagcacttgcacttcaatttgttagccaagacggatcaggcagcctttttagaaaatggaacgcctgatgtgaaggaatttgtggctgaagtgcccgaaatagcagatcaagagcataagaaggtcgctgcaatagtcatgaatgcaaatccgtttaccttgggtcatcagcatttgattaagatggctagtgaagaaaacgatttggtttatgtctttgttgtggctaatgatgtttctttgtttagctttgatgagcgcttcaaattggtgcaagaaggtactaaggagtttagtaatgtgaaagtaatctctggcggagactacatggtttcaccagctacttttccagcatacttcttaaaatcacctgacgatttaattgctgtacaaacggtgatagacgcagctgtctttaagaatcaaattgcaccaggactgaacattacccgtcgttatattggtaaagaaccaatttcaagaacgactcacttttataatgttagcctagcgcatgagcttggtcctgagattgaagtaatcgtaattgatcgcttggaaaaagacggtcaaattgttactgccactaaagttagacagctgatcaaggatggcaatttaaaagagatcaataaattcgtgccggaaacgacttatgaatttattaagcaaaacatgcagaaattgcagtctaaaattgagaaaggaatgaatattaatggaaattaaaaccacagcagttgcgggaacacttgagagttcagatatccaaatcatgatttcaaagggttctaacggcattgagattgaccttgaatcagaagtaaaaaaggcctatggagatcagattgaaaaggtgattactgacaccttaaaagcttatggcttagaaaatgccaaggttaaagcaaccgataagggagcactggattgtgtaattaaggctcgtactttagcagctgcacaacgtgcaaccgaaacttcagacaagccagatttggaggtgctctaaatgacatacgttaagaatcgtttgcgtagaaccatgatgtttgtacctggtaataatccagctatgattaaggatgctggcatttatggtgcagattcgattatgcttgatttggaagactcagtttcattaacggaaaaagatgctgccagaatgttggtctatgaggcaattaagacagtcgatttcggtggcagtgaaattgtagttcgtgttaatggtcaagacacgccattttacgatgaagatgttaaggcaatggtaaaagccggcgttgacgttattcgcttgcctaaaactgaatcagctgcaatgattcaaaaattggtaaaggatatcgaacattgggaagatgaatttgacattgaaaatggttctattggcgtgatggctgccatcgaatcagccaagggtgtcttaaatgccccaaaaattgcaaccgcaacgcctttaatgatgggcttggcggtatctggcgaagactatactgcagatatgcatactcatcgttatccagatggtcgcgaattggaatttgcgcgtaacatggttttacaagcagctcgggccgcagacgtatatgcctttgatacagtgttctcaaatatgaaggatactgaaggcttctatcgtgaaactaactatatccatgaactagggtatgatggcaagagtttggttaacccacgtcaaattcaaatggttaataaggtctttaatccaactaaagaagagattgagcaagctaagaatgttgaaaatgccattcgtgaagccaaagctaagggctcaggcgttatttcacttaatggtaagatgatcgataagccagttgtagaaaaggctaccagggttttggaaacagcgaaagcttctaacttgattgataaagaaggtaactacattggagaataaagtaaaacgcgaattaccagatgatttaatgaaaaaaatgaatttgaaaccatttgaaactactgaaattggtcatcctgaagttaagcgggttgctccaaaggtaagagttactactggacaaaataagattattgattcacttgatgaggtaatcaagaataacctgaaagatggtatgactatttcattccaccaccattttagaaatggggattatgtttttaacttggtaatggacaagattattagtatgggttaccaggatttaaccttggctccaagttcacttactggtgttatgaatgataaagttatcgaagcgattaaaaagggagtaatcactaatattacttcttcgggtatgcgcggttcactaggtgattttgtttcacatggcggcttgaagaatcctgtaattttccgctcacatggtaatcgtgctcgttcaattgaagaaggcgagattaaggttgatgttgccttcttgggtgtgccagtatctgatcccgcaggtaatgctaacggtcaagatggggatgctgtcttcggctcattgggctatgccctaatggatgctcgctatgctaataaggttgttttattaactgataatattgttgattatccaaatacgcctgcgtcaattcagcaagatcaagtggattatgtggttaaaattgataaagtcggagatccagacaagattggttctggtgccactcgctttcccaaggatcctaaggaactcaagattgctcaaatggttaaccaggtaatcattaactctccatattacaagcaagggtttagcttccaaactggttctggtggtgctgcattagctgtcaccaggtacttacgtcaaagtatgattgatgatggcattactgcatcatttgctttgggtggtattactaaacctaccactgacttacttgaagaaggtctagtcagaaaagttatggatgtgcaggactttgataagggtgctgcccaatcaatggctaacaataaaaatcaacaagaaattgatgcttcttggtatgctgatcctcataataagggtgcagtggttaacaacttggatgtttcaatcttgtcagctttacaaatcgatactgacttcaatgttaatgttatgactggctcagatggtgtcattcgtggagccgtcggtggtcaccaagattccgcagctggtgccaagatgacgattattacagctcctcttgttcggggacgtaatgcgactgttgttccaagagtagaaactattgttactccaggttcatcaattgatgttttagtaactgaaagaggaattgccattaatccagctcgccaggatttagtggatgcctttagtaaggtgccaggacttaagatcttggatattaatgaattgcaaaaaatggctgaaaaacaagttggtgtaccaaagccacttgaatatactgatcgtacggttgccttagttgagtatcgtgatggtactatcattgataccattaaggaagttagggattagttcaaaacgaaatgtatgaataagtaatcacaaaggtgtcacgaaagtggcatctttttgtttttattaaaatgttaagttgtatttttgcaagaaacgttttttaattatttgtgcaaatattttattcctgaattgtcaaattaagtgcaacagttaggttatgaagagatatattgcttgaagagttcctctgctgtgtgatattggaggattcggcgatatttgtggttaatggcatcagttgcctgttgaacataagcttttgacttgtctttcatgctcttgcccttagggaagaattgacgcaaaagaccattgcagttctcattggtgcccctttcccatggagaatatgggtgagcaaagtaaatctggcagcccttgatcttggtcatatccgcaaactcagagccattgtcaaacgtgattgatttaaaccaggcaggatgtctgtcaatctccttttgaagcagcctttggcatgtgcttgcccgatagtcaggaatcttgataactacttcaaagcgtgtggttctttcagtcaaagtcattaaagcaggctgattcttgcgtctgacgcctttaaccagatctccttcccagtgcagcggagcttttctgtcttcaacctccttaggacgctgttcaatggaattgccaagatgcttcttgtgcaaagcgtgaccgccatggctgtgatgacgcttgttcctgcgtcttttgagcttcataggcagatcaatattgcttatgtccagcaagccctgatcaatatagcgatagacggttggtgtgctgggacaagggtagcctggcatagtccttttgaattcaccaacgaactcatcgatgctggtggcatcaaatttagctttaaagcgtctggagagcattctcaaaaagacagcataatgcttcaatggattgcgctgatagcagtttttgcgacgcttctcataataaatctgtgcagtatcagcgtaatagtgctcatacaataaatagctgctgtctctttgcaggacgcttccgcgtttgatttcgcgactgattgtcgacttatggcagccaacttcttgagcgataacagtacgggaagttatgccggaatccagcattgcttgaatttgtccacgttgtacgctggttaattgatgatagtgcttagaaatgctagaatttgaattggtcatgaagatcttcctttcttgatttttcgtcacttcaagtttaggtcttcatggcctttttgtttaacacttagtgttgcacttcaattttaaatccggggcaaatattttattttcaagcataaatatttgcaaattctaactacgatgcagtagtaaagtcacatcgcaatatcggtcaactaagaagaaccagtgtaggtgaaatatctgcattggttctttgcgtaaaaaaacacctcgttttaagaacgaggtgcgcgtatacatatatttttctgagtaattttattatgacacaaattagattgattttcacttatttagactcattattttgttttgatgaatatttttgttaaagtgaactaatgctaatgattttttgaggggagataaatatggaaagttggttatttctagcattggtgctagttgtagcgttattgggtaaaaacatgtcattaattattgcaacgggagtggtaatggtgtttaaattattaccgtttactagtaaatggctgcctactattcaagcaaaggggattaattggggcgtaactattatttcggttgcaattctagttcctattgcgacaggacagattggctttaaggatctgattaaaacttttaagtcgccagctggatggattgccattttagcgggaattgctgtagctatcttgtcacgttatggtgttgatcaattagcagcggtgccacaggtgacggttgcattagttttaggtactattattggagtagtggttttcaagggtgtagctgcaggtcctgtgattgctagtggaatgacatacttagtaattacgctgtttaacctacatttttgaggtataattatgaaaagtgaggcgatttaatgattattgtacatgaaaatacgcaagagcgattagatgactatcttgaacaccgtttgcgtaattatgaaataatcacgccgccgattcctaagaaacctgagattgtcactcaagatgatcataaacagaaaaatcgaaaaccaaaaagggaccattaggtccttttaattttggtctaaataaatggattataaaatctaccatgatcaagttgccagagaccaaccacaattaataccaaaatcacggctgcgatcattacaagataatcagcttttttaaatgattgggtgacataccaggtccgttttttctttgagccaaagcggcgtaattgcatggctgttgaaattgtatcgattcgatccaaactggagaagataagaggcatcacgatattcaatgtccccttaattcgtttgcctaaactagcctttttggatagttcattgccacgtgcttgttgggcagctgagatatcccaataagaattttggatatctgggatgtagcgtagagctagagaaacagcataggaaattttgtaactaatgccgattttatttaatgaagcagcaaattgactaggattagtagttaatagaaacagcaatacgattggaattgagcagacatattttaagaaaagattgaataagtagaatacctcttgcaatgttaatgtgaagtagccggcatggatcaagatgcttttagaatgataaatattttcaccatagcttggctgaaagatgaaaacaaaaatcagatttagcaacatgaaaactacaataaatttcacgataaaagaaatctgactccacttaatttttgcctctttaaacaagaaaattgataaaatacagatagcaattaagaatctggtatcataagttaccatacaagcaaccgagactaggagcataaaaactaacttagtggttgcgtttaattgataaataaaagaatcaccaggttgataacctaaaacttggctttcattatgcatgtttttcatccctttctgcatcaatataggcgcggacaaagctatctggattttctaattgatatttgatagcgagattatataaggaggttcgcttcaaagcagcctttttaattaaagctttttcagttaataacttgattggatctgtgtcagcaattagtgttccatcagcaaaagccagggatctgttagtgtattccatcagcaagtacatatcgtgagtgataatcataattgttttgccttgatcattaagctgttttaaaaagttcatgatctcagtataagtttgccaatcttgccctgcagttggttcatcaagaattaataactcaggattaagcactaaaattgcagcaattgtgactcgctttttctgaccgaaggataaagcagagattggccagttgcggtacggataaagaccacaaactttcaaagtatcatagaccttagtgcgaatagtctgctcatcataaccacgtagacgcaagcctagagctacttcgtcaaaaatcattttttgggaaatcatctggttaggatcttgcatgacataaccaatcttatcggaacgctctttgattgaaaactgcttaaggttatcaccatcaaataaaataagtccctcattgtcgataaagccacaaataattcgacaaagggtggtttttcccgcaccattttgaccaactattgaaacaaaatcgccttgattgattgtcgctgtaacgtcatgtaaaggatgaatctgcaatttactataacggtggccgacgcctttgagttctaatagaggatgagtctcttctttttcaccacttagggtaatgttgttttgccattcttgcaactgcttagcaatttcaggatcttggggcaaagcagcgactgaagttaggtcgggaatacgcgtaaggtcgacgttagctttttttaaggcatttaaataaagaggactacgaacaccaacgtcttctaaacaattctcatgtaatagatcatttggcttcttatcagctacaatttcaccatcattaattaggataatgcgatctataggctgactccaaacttcttctagacggtgttcaataatgattactgtagcatttaattctttttgaatgcgatcaattaaagccatcgttttcattcctgaagctggggctaaattagcaagtggctcgtcaaaaagtaaaattggtgattcatcaaccatgacaccagctagagcaacaatttgtttttgaccaccagatagattttgtggcgcctgctttaataaatgctcaatccctaattcatcagcccagcgatgaacaacttgtttcatataattttgtggttggcagtcgttttccaaagcaaaagcaatgtcttcaccaacagttaagccgataaattgactgtcagtatcttgtaggatagttgaggtggtgaaagaaagatcaaataggttagtgtctttaatattattgccgttaatagtgcattcaccggtgatctcaccagtatctagattaggaattaggccgttaatacagcggccaatggtcgatttacctgaacctgatggtccagcaattaacaatttttcaccttgtttgatagttagattaatctgttttagtgttggctcggcctgactgtcatacttaaatgaaaaatctttgaattcaataattgttttaggcattgtttaatcctccttgcgcaagctgccttttttaatcttggttccagcataagctttaagtaggagcgtgccaatgaccataattgtaataccattagaaagcgtagccgaaattccttggacaaaaactttgttagcaggttcgctatagatgataatgtcaccgattggtgcaactacaatccaggcgagaatattggcaataatttgaatgatattaaaaaagattatttgtttaataccaaaaataccattttttaagtctaagcgtttggccgctaaaccgatgatccagcctaaaacagcagtagctaatacccagctccaccaagtctgcccgtacataatgaaatcggacaaagcatgtccaataaagccgacaataaaaccgaccttagcgccatagattgacgcaaaaagagccaaaaaaggaaagactaattcaatatttgtgttaggaataggcgtaggaatcgatgtgaaacgtgctaaaataacatagattgccgatccaattccgatcgctacaacatttttaactgataaacccttagtatgcatatttttctccaaaatttagtatatttacaaggtataattagtaagcggtaacagtcaagctgattgggagatccaatctatttaataaatttgtagaagaattgctaagagggtatccttatattaaagaaaagaatttataaattagaggtaaaaaatgaagcaggatgaattaaagaaaattaaccatgaaataggttcgtatgttgctaaggtaaccaagacaatttgggttgacgataggacattgcagattgccacaatgatgattgattcttatggcgataccgtatatgtttgggttgaggaagccgatgatcattgccgcgttagtgatggcggacgaattctatttaagctagatcctaatgaggaagataaagagttatatgaaactgcggaagatattgcgctagggtcaggttatgaatttgatgaaaaacactgtgaaatttttgttgatgttgatcgcaagaatgtggctcaggcggcaatgaagctggcacaattacaagtagcaatttcatatttaggctaaaaaaagacatccctaagttttctttgattagggatgtcctttatttttaagtcatttcgaaaaactttagacatttgccatccttcctaggttcacatcttgtggctttttaccattgaggtcaaaatttgcaattgcttgtgctaaagccatcattgatacaacatctggaatacattcatcaattctaaactccataatgctcacctcccagtcattgtaaatccaactttagtaattgttaaccagtacataacaaattttagcatagaaaaagcagccaatttttggctgctttttctattttttattgctatgttgcataaagataaagaaggcagaaataatattaacaatcacagcaggtaaggctagagcagcggtaaagccatatagtgcattaccaattactcctaaaattggcccaattggtgagatattcatgttatgcgattgcactactgcaacggcattaaggatcacgccgaaccaggcaaataagtaaaatattaaagctattctagcagtgaagtcagctccaaggatggcaaaccaagagctaatgaataacacacaattgatcaggttcagtgcaccaatccataaatcatatttagattttttcattttttctcctcattataaatagtctatctctgtattactttagcgaattaatcgatattttgcaaaacgcgttgggcaattgcatcattagttactagatgagtaatgataccgctacgtaaggcgccaaggagtgcctcagatttaaagcgattgcggacgacacaaaaacgaattggcgttttcataatgtcattcatgctgataccacaaatgtgttgttcgaagtcagggaaaaattcacctttaatattatatggtcgtcccatgatcattccagctacatcgcagtcaggaatgtctttaaatagttcaggtccataattttctttcaaaaattgattagcttgaaatgattggaaagtactaagaccagtgaaaagcatgtctaagtgatgataacaattttcaattactttaaaataaggctcatgtttcaaggcaggcatgatctttggatttagtatataaagtggggttggcagacttagactatgggaatgcaatttttctgctgcatcttgggccaatggattcttcctgcggttagaattaattggttgaccaagtaattgaataaagtaaagttgctctaagtcctgctcaaaaaagtcgttgatcacgccatgcattgttgcaccccaactaataccagcgatttttgcttgctttagataggtttcaatttgtttagcagcgaagttaactacggcttcactattttcatcgcggttgccggtagtttcgacaataaaagcttcttttaatctgaatcttttctgaaattctctctctagtacctgattgcgtttgattccacgcgagattttaattttaacaattccacggttacgcgcgtcttctagtgctttagcgattaaatatcgcgataaatcatatttttgtgagatatcagcaatattaagctgactaaggtaaaagtcatgagcaatgttagcaagttgttcatcagttaattgagccactttaaatcatcctttatttcaaaataacttatatgtctattataaatttaaaataataaaaaggagcagcaaattttaaaatatcaaaaattatgatgaagttcctgtggtagaatataatggttataattatgcgaactatgtgagggaaagtaataatagcatgagtgaaattgatcgagaacatcatttatcagaaaaacatcatatgaagattctgtgggaggaatttttcaagagcgataatagtacgatggcgcaggatgcaacattagttgaaaagacctcgattgtaggtcgagtaggtattatgcttttaagctgtggtacaggtgcttggcgagtacgtgattcaatggatacggttgccagaaccttgggcattacctgttcaacggatattggattagtgtcaattgaatatacctgttttgatgttgataatgaatcatattcccagactttatcgttaccagcaacaggtgtgaatatgactaagttgaatgaaatggaaaaattcgttcggcaatttgaaaagggacatggggaatggactatcggtcaaattcataaacgcttacgggagatttctcagcaaaagtcagcgtattctccgttaatttcgggacttagttcaggcttggcctgcggcggctttattttcttattaggcggcggtcttcctgaggtgatctgtgctttcttgggtgcagcttgcggtcaatatattagagcaattatgggtaagcacaggttaactttggtagccaagattgcggttgcggttgccatagcctgcagtgtttactttatgagttttcatgtaggagaaatattattccacattaatcatgatcatgcctatggctatattggtgccatgttgttcgtaattccgggttttccatttattacatctggattggacatgtctaagttagatatgcgctctgggcttgaacggctgacttatgcgattttaattatcgtaattgcaacgatggcaggctgggctgtagcaacaattttgcgtttgcatccaggatctatgcctaagttaaaaattgatccagggactttaacctgcttgcgattgctggctagcttttgtggggtgtttggtttttcaattatgtttaacagtcgaccacaaatggcagctacagccgcggtaatgggagcaatggcaaatacattacgtcttagcttggtcgattatgctcaggttgctccagctttggcagcatttattggtgctttaacagctggtctattagcaagtattgtaaggaaaaaagttggttttccaagaattgcaattactgttccatcaattgtaattatggtgcctggtctttacatgtatcgagctgtatttaactttggaatcacgaatattaatatcggagcttattggatcgtagaagcgttgatgattgtcgtggccttgctattaggtcttttagctgcacgtatcttaactgataagaagtggagacatgcagattaaataaattaaggtagaaaaaagagacggattttttgtctgtctcttttagttgtgtgtcgggcatggcatttgtttagtctagtgaaagtctagatcacgggtagttgtcgccaagtgtagcgaaccacaagccgttagcggtgacgctatgggtgaaggaagtggctagcgagttttccgagcctacgtacagaaacctggtcaggccaaatggtggatgagactgcagcacaagttaaagtccaaaggacaaccgtaaaaccaagacggtaaaccagggggcagtggaaaattaaagatgaatgtcttaccccgagagatctcgtggacaggtgaaaccgagtaagctttaatatcagcgatcgtaagcctggtcgaaaaaggttaatcgcgagaagtcagctgaggtcgtagtagtgctgaaggttttgtaatgaaactggagcgaagggcctaatgtttgtaagagcatatctcgctataagcaatgttcagacagtccggataagaggatagcctagcacaaagagaacgtaactctttgatggtgaaagcaattgggacaattctgaataaatttacaagtagaaatggagatatcacgagatggaactaattgaacagattttaagtcaaaataatctcaaggaagcaatcaggagagtcaaaatcaataagggagcgcctggtgtagacaggagaacagttgatgagcttgatagctattttaaaaagcatcaagtagaaataaaggacgccatcatgaagatgaagtatcgtccgcaagctgttcgcagagtctacattcctaaagctaatggtaagaaacgtcctttaggaatacccacggttgttgaccgagtaatccagcaggctattgcccaagtattaatgaagatctatgatcctcattttagtgagcatagctatggctttagacctggacgcagtgctcatgacgctattgaacaagtcttggaatatttaaacgaaggctatcaatgggttgttgacctggatattgagaaatactttgacacggtaaatcatgataaattaatttcaataattagagagcaagtaaatgacaaaaccaccctccatttaattcgagcctttcttaaagctggagtaatggaagatggttgggttaagcctaataaactaggtgtaccacaaggcggccctctttcaccaattctatccaatatctatttagataaaatggataaagaattggaacaaagaggcctgcgctttgtccgctatgccgatgactgcaatatctttgtcaaaagcggtaaatcagccaaacgtgtgatgaattcaatttcatcatggctagaaagaaagctattcctaaaggtcaacgcaaccaaaaccaaagttgtacgaccaaccaagagcaactttcttggctttaccttctggaaaagtggcgaatactggcaagcaaagccaggagatgaccgcaaaatcaagctttatgacaagatgagagaacttctctgtcgcagaaaagcagctgctcagcctctatcactagtctttactaagataaatcaagtagttagaggctgggtcaattactttagagttggcgacatgaaatattttctaattaagttcagtcaatggctgcgtcataaagtacgggtggtaatcattaaacaatggaaactaccaaaacgaatatacattaacttaatgcggattaacaaggcactaaagtgcaattttagtgatgaagatattcataaagtagctaatacgcgcttaggttggtataaaagaagtacgggtcatgtcattaactttctgcttagcccaaaagtattgggcataagcaaagcggatcgcccaggcttggtcgatccgctagaatattatttatctcgtaaataatcacaaacgtagcgccggatacggaaccgtacgtccggtgcaatgagaggggcgagttataaaactccctctactctattgctattgttaattaatcatgctttctttttgtaatagtaaatcccagtagtcctagtgctgctaaagctagaccgattaagctcaggttagaattattttgactagtttgtggtaatttagaactaatattattgtaagacttaacgatattattagtagttctagtctttgttgttgaatttggaatattattaatggcagttccatggggtggaataattccatctttgtgttgcttctgtctttgcatatcagtgccataaggatgactgctagaattccaatttacttttttgtgaatctttgtctgtttgtattcattagacttaggtggttcagacttatttggctcagaaggctgcttcggttgttctggagtagtcggagtctcagattcaggtgtaggaataggagttggggttggttccggtttagaagcggagtaactatagggtacccaaatgctaatagttgctagattgccagttgttgttttttgaccattaactgtggtagaagcaattgaagctaaaaactccgaattaggtgcaattgcggaaatcccagtaattgaattgcttgtagcagtaagtttattctgtgaagaagcaatgtgaaccacgccatttttatctaaatgataatggccatcaattatgtctttaattgtagtattgttatacggaatagctgaaaatgcttgattgtttgatattcattgtgaccagtttgtttctgtgccttgcggatccttaactaaatcaacaaccctgcttctagagtaaataacttcttttactacatttggagtaggtgtttcatcatttttaggaacagccacatctggattatttataccggaaaagttttggctcttaagaccgtttacatagtagccttttacttcttccctaactgtagcagtttgcttttctatctgcgtttcatgaactaagtaaatgatgaagtgttgatctacattttcattattatcaaagttgccaaagccgatactgctgtccgtttttaatgtggcattggcgccagaaactttttcaattttatagtgcttatttttaaataaagctaatgcttcttctaacctgctaaattgaataggggtattagctgattggtcgtctttattttggtaatcagcactaagcccttgaccagcttcatcactagtcattgagagttgaaacccattatcgttaagtagtttattgattgcttgatcggttttatcagtgtcatcataaaatctgacatctgcatgttgagttatgtagtagggaatagttaattcatagtgagtaccgtctggagttgatgaagcaataatgaattggtgttgattattgagtctaattttatcaggagtaacaatattaactaagtctgctacatattttgcattagcgtttttattaggagaaactgtgacagtatatgcttgggctaaagcgttccaagttttgccattatcaatagaatattgagtccagctttggcccgaatcttcagatttaagtttgagcatgacttcatcagatgcaaatggagtgttagatttttgacttccgttagcgtagatatggttaattacgtagctaatagttttagtttgttcagtttcactgtcagaactacctttaatttggccgttccatgagaatgttttggtctctttaagcaatccttgaccagccattaaagaagctgattcatctttttttatttcggaagcgttgttacctttttcatctgtatgaaaagcggtaatttcgactgtttgttgttttgttttttcttggtttggtgaatctttagctgaactttgattattttggttacttggatcagcttgagttgactggatggtattatttgactgttcttgattagatttttgtgaatcttgttgagtttgttcttcattagtcgcagtattagtatccgcatgaacaagttgactattacttaagaaaaaagtagtgctaagtgcaactgcagctaaaccaacagacaactttctaaaaccaaatttttgttttccattaaattttgtattgaagctcaaatcatttttgtgtttaatttatctaaaccttcttttgggaacgtaaaagactgagtcttttacaatttattatcaatgtgttctttttacatttgacaacatattagattagcacaaataaataacattgctgatataaatttgacttttttataggcaaaaactttctttttagtataaatagtttagccttatatattaaatatttataatttgataataaataactattatatagaaaataaaaaatggcatgatatcaaaccacgtcattttaaatctgttattattttttcgctttatttacttggcaattgctaatgccgtaacaacaaaggcagcgatcatggtaactacaaagccaataattcctaacaatatattcatttttgtcatcttcttctatgtaattgttatattctgtatgcggtacatatatttactataacacaaaagaagaagaataacgcaataaattgtaagcgctttttattcttttagatcaataaaaggagcatggcagaatttggctaagtcttctgggttcaaaaagacactgcggccaacttcaccactagaaacaccaatttcaggatttccttgcatagagtcatccaaatagataggaaacttttccttaaaataaattccgataggagtattagcgccatgtacataaccagttgttttggctaatttctttaagggaagcatttcacattttttgttaccagaaactttagctaattttttcatgcttaaatgttcagtaactggtacgacaccaaccaatggaccagttttatttccttcgcagacgagagttttatagactaaacgctctttgtcttctaaaatagaagtgttcatttgtgcaactccgcctttatcttcggagacagcaaattgagcttgacgatacttgattttattttggtctaagattttttcgaccaatgttttttcgagtttgttctttttatttttcttctttgacatatttatcacctgttatcatgatagcattatgccaagaaaatcccaaaggagataatattaatgaaattactaattattaaaattgatactagtcatgaagttgaagacgctttgagcgtttttgctttagataatctgaatgcattgggtattgaatcaagaaagcgtagcgactttgagcaagcaggctggttgcatgattctactgtagttgaaatggatgacattaaagacttacctaaggatacatatttctatgcttattttgatgaagaagcagataaagacgcattagtaaaaaaattccaagataagttaaaggaattgaagagctatggcctagatgtaggggatgccaaaattacaacttcatacattaaggaccaagattggaacacggcatggcaaaagtattatcacgtgattgatttttcacgtcacttggcaattgtgcctgaatgggaagattacaaacccgcttttaaggaccagcaattaattaagcttgatccaggcttagcttttggtacaggaaatcacaaaactactcaattagcaatgatgggcctagagagagcaatggttaagccaatgaatgtagtggacgttggtacagggtccggtattttggcaattgctgcatcaaaattaggagcaactgacgttttagccacagatatttcagatgaatcaatgactgcagccaaacaaaatgcagccttaaacgatattaataatattcacactcaaaagactagtttgttagctgatgttaaaggcaagtttgacatcattgttgccaatattttggcagaaattttactagacttgattccacaaatggatagtcatttaaacgacgatggtcaagttatcttttctggaattgactacctgcaattgcctaagattgaaaaggctctagacgagaatggctttaaggtcgatttaaccatgcgtcaaggtcgctggattggactagcaattactagaaaagaaaaataaatatggtaaaatattatcaattaaattaaactttgatgagaggcacaatcttttaatgaaaaaactaggaaataaaatcgaagcaattccaattgtcaggaagttgaattctcatcgctggatgtcacttgtctggtggagtattttggtaatgattttgccgtatatctttagcatttgccgtgtgccggtagtgtggcgagaagcaattctgttttttattattaacagcatcattgcataccatctaggcaatttatttattaaacttaacctgtccaagtggtggattttcttgttacctgtgcttttctgcttagcaatgttgccacattttgctttgtataatttaatgtttggtttaatttacttaataattgaagcttttggcttaatgaataaaaatatttaccgctagaggggatgatcataatgtccaaatacattgaaatgacgcatgatcaggtaattgatacctgcaaaaagtatatgaatgatgaccaggtggcctttgttgaaaaagcatatgaatttgccaataaagctcatgctggacagaaacgggcgtctggacaaccttatattattcatccaacgcaagtggctggaactttagctacattaggcttagatcctgatacagttgcagcgggctttttgcacgatacagtggaagataccccagttacaaatgatgagctgaaggaaaaatttggtgaagatgtagcttttattgttgatggtgtaaccaagttaaacaaatatgagtacaagtctcatcaagaatttttagctgagaatcaccgtaaaatgttgattgccatggctcaagatctacgtgtaattatggtgaagttagccgaccgtttacacaatatgcatactctgcaacacttacgacctgataagcagcggcgtattgcttccgaaacaatggatatttatgcaccgctggctgatcgtctaggtattgggacaattaagtgggaactagaagatatgtctttccactacttaaatcccgaagcctattaccgcattgttaacttgatggatgtcaagcgaagccagcgtgaaaaatatattgccgatacaatcaagactttgaagaagactctaaatgaattaggcattaaatatgaaatttatggtcgtccgaagcatatttattcaatctataaaaagatggttaataagcataaagattttgatgagatttatgacttattggccgtacgtgtaattgttaaaaatgtgcgtgattgttatgctgttttgggtgctgttcatactgaatggaagccaatgccaggtcgttttaaggattacattgctatgccaaaggttaacggctatcaatcactccatacaaccattattgggcctggcggtcgtccactagaaattcagattagaactgaacaaatgcataaagtagctgaatatggtgtggctgcacactgggcttataagcgtggcaattttactggtgttgagcaaagtacctctggtgaaaagctggatatggtaagagaaatccttgaattaaaggatgaaactaaagatgccggtgaatttatgaagtctgttaaaagtgatattttttcagacagagtttatgtttttacgcctaaaggtgaagtatatgaactacctaaaggttcggttacgctagattttgcctatgcaattcacactcaagttggtagtcatgcagtaggtgccaaagttaataacaaattagttcctttggactataaattacgcaatggcgatgttattgaaattatgacacagactaatgcagcgccatcgcgtgactgggttgacatggtgaagacttcaagagcacgcaacaagattagacgctacttcagaagtcaggatagagaagatagcatccagcatggtgaacaattgattgctgatatgttgcgcgatgaggatctttcacccaaagaatttatggccagggatcgaattgaaaagctattagagcactttaattatcacactgcagatgaactatatgcggcagtaggctttggtgatctttctgctcaagcagtggttaatcgcttgacggttgatttgcgccgtgaggaagaaaatcaaaaacaaaaagagctggaagaaaagattttgaattctggacaacaagcagttcaagaagaacaacctaagaagaattcaaatactacaatgaaggttaagcataaaaatggcgtcatgatccaaggcgttagtgacttaatgcttcatttagctaagtgttgtaatccagttccaggtgacaagattattgggtatgtaactaaaggtcgcggtgtaactattcaccgaacagattgccgtaatatcaccaaagaagctgaagaacaaggccgcttaattgatgttgaatgggaaaatgttgaggaaaatagtgttcaatcctttaatgcaaatattgaagtctttggttacaatcgttccaatctgcttagtgacgttattaataagttgaactcacttactaagaatattaataatatctctggtaaagtaaacgaagataatgttgcacatatgtatgtcacagttgctgtacggaatgcagatcaactagatgaaattttgagtaaattacgtgatattccagacgtatacgaaactaagaggtcagataattaatgcgagttgtaattcagagagtaaatcatgctcaagtagatattgacggtaaaactgtgggcaagattggtaaaggctttttattattagttggcatcaaaaatggtgatgaattgccagtaatcaaaaaagcagctgataaaatagctaaaatgcgtatttttgaagatgaggaggggaagactaacttgtctttaaaggatgttaacggagaaattttgtcggtatcacaatttacgttgatggcaaatactaaaaaaggcaaccgtcctagttttgttgatgcgatgcgtccaccaagatcgaaagaactttgggaagactttaatcaagaactagaaaatgacggtttccacgttgagactggtgagtttggggctgacatgcaagttagtttagaaaacgatggtccattcacgattgtgttagatctttagcgaaaaaatgagaccgcaaaggttgacaatgtcttgagaaaaatataagctaagtaagaattatcgatgacaaagaatgtggattagcaatgatctattcaaagagactgctcgttgtggtgagagagtagatagatcgcggtctgtgacacctttaacagataatggatcgtttggcgagcgttaatcgcagcaaccaaaaaggtggtaccgtgctaatctaagcgcccttgattaagttcaagggcgctttttatttttaatcaagttatcaaaatataaaaaggatgattaaatgagagttcaaaaacctaagggaacagttgatattttgcctgatcaatctggttcatggcaaaaagttgaagaaactgccagaaatttcttcaatcgcgcaaattatcgtgagattcgcacaccaagttttgaaaattatgaaatctttgctcgttcaagtggcgatagttcagaaatcgttgaaaaacagatgtacgacttcgatgataaggggggtcgccatattgcccttcgcccagaaggaacagcaggcgtagtgcgggcttatgtagaagacaagatgtatgcgccagaagttgttaagccatttaatgttttttatatggaatcaacttttagatatgaaagaccacaagccggtcgtcaacgtgaatttcaccaaattggggtagagagctttggctcaagcaacccattaagtgatgtacaaacaatcatgatgggacatgatttattgggtgagttaggcgttaagaattaccaacttcacattaacactttggggaatgagcaagtacgtcaagattatcatgatgctttggttaattatttcactcctttgaaagatgagttatcagaagactcacaaagaagattgcgtgataatccattgcgtattttagattctaaagatgaacgtgataagaagttcttgcctaaggcacctaagattcgtgaatttttggatgacgattcaaaagctaattttgacgcaatcttgaagatgttaggtcaacttggtattgattatgtaattgatgatgatctagtacgtggacttgattactatactggaattatctttgaatttatggttgaagataagagcttatgggaaagtgcaactactattcttggtggtggtagatatgatcacttggtagaagaattcaatggacccgctactccagccgttggtttcgggattggcgaagaaagattgatgttagtgcttgaaaagcaaaatcctgcattattcgagaaacgcggtattgatttctttattactaatattggtgacggtactgcacaaaaggcaattgaaattgcacgtagccttcgtaatcaaggttttgaagctgactttgatgtcaatcagaagaagttaaagaaccaattcaagaaggcagatcgtgaaggtgctaagtatgttattactttaggtgaaaaggaactcgctaacggcgttttgaatattaaacgtttagctgatggcaagacaatcgatttaagtcttgaagatctaaataacatgactaaaataatggatgaattgaaggactagtaacaatggaaaagatcgaaaaaagaacagattattgtggcaatattactgaaaaatacatcggtcaagatgtaaatctctatggttgggtacaacgtgtacgtaacttaggtaacttggttttcatcgatttgcgtgaccgtgaaggcttggttcagatcgttgttaacaaagattctggtaagaagttaatggatattgccgattcacttggtaatgaatatgttgttcaagttaaggggaaagttgttaagcgttcagaagttaaccctgacatgaagactggtcaagttgaagttgatgcaactgaaatcattattttaaacaaggctaagaaccctccatttgaaattaaagatggaattgaagtctcagaacaaactagattaaagtatcgctatcttgatcttcgccgtccagaagttcaacaagcaattattttacgttcaaagattttgcgtgctactcatgaattctttgatgaaaatggttttattgatattgaaactccaatcttaggtaagtcatcacctgaaggtgcacgtgactacttagtaccatcaagaatctatccaggtagtttctacgctttgccacaatcaccacaactgttcaagcagcttttaatgggtgcaggatttgacaagtattaccagttagctcgttgtttccgtgatgaagacctacgtggtgaccgccaaccagaatttactcaaattgatatggaaatgtcatttgctgatgaagaaactattcagagttatactgaaggtcttttgaagaaaattatgaaagatgtcaagggcattgatcttaaaactccaattaagcgaattacttggactgattcaatgaacaagtatggctgtgacaaaccagatactcgttacggtatgttgattcatgacttaagcccaattttcaaggatagtgactttaaggtcttctccggtgcaattgctgatggcggttttgttaagggaattgctgttaaaaatggtgcaaaagaatactcacgtaagaagattgacaagaaggctgactttattaaacgtttccacgctaaaggtttggcttgggttaaatttgaagatggcgaattttcaggccctgttgctcgcttcttgactgatgagaacaaagaagctttgaagaaggaatttgatcttgaaggcggcgaattagtagtattcgtaactgataagtggaaggtatgttgtgattcacttgaccaccttcgtcgtgaatttgccaaagaaactggtattgttcctaagggtgtttatgactttgtttgggttgttgattggccattatttgaatacgatgaaggacttggccgttgggtagcagctcaccacccattcactatgccagatgatgaaggggttaagttgctaactactgaacctcataaggctcacgcacgtagttatgatattgttatgaatggtgatgagatgggcggtggctcaatccgtatccacaagcgctcaattcaagaaaatatgtttaaggcacttggtttcactaagaaacgtgcatatgaacaatttggttacttgatggatgctttggacatgggcttcccacctcacgcaggtttagctatcggtcttgatcgatttgcaatgatgcttgctgataaggataatattcgtgacgtttcagcattccctaagaatgcttctgcttcagaaccaatgatgcatgctccagctccagtagctgatcaacaattagctgacttggggatcgaagttgaggaaaagtaccaagacagtgtaaaggcaaccgaagagcgtcttgaaaagatggctgctgaagatgctgcagaaaattcaacttgggataagtaataaatcaatataataaaaaataagtgatctcgctttaattgagatcacttatttttttatctgaattataaattattaacgaaattactaatccgagctaaactttcttttaattgctcagttgatgatgcataagaaagacggacataaccttcaccgcccttgccaaagtagcgaccaggagtgacaccgacttttgctttttgagccagctcaaaagcgaattgttcatcattggtgccatatttttcggggatcttagcaaaaatgtagaatgctccttgcggtgtggccatttcaaagcccaacttttctaagccagattgcataaagtttaaacgtgcttcgtagatttcacgtgcttttttaggatcgttttgaccattgtttaaggcttcgacagcagctatttgaacgttatcagtaactgaagtaactaaaaatgaattaatcttgcggatgctcttcatgatttgtttaggggcagcaatatagcctaaacgccagccagtcatagcataagccttggataaaccggaaatcaaaatatttctgtcagggatgtattcagaaagtgagtgatgtttggctttgccataaacaagttctgcataaatttcatcagttacagaaaagattttgtattccttaatgacatctgctaaggcttttagagctgtggcagaataaacgcggccagttggattagaaggatcagttaaaataattgcctttgcacctttaccgcgaccattgagaacatgacgtaaatgttcagctgttaagatgaagtcatcttttttagtatcgacttgaatagggattgctccagtcattttaattagctgaaagtataaagcccaaaccggagtaggaaccaaaattttgtcaccggggttaagcaaggtcataaagacatcatttaatgcacctgttgcaccgacagtgacacagatttcactttttggatcataatgtacaccaattgagcggtcaaggtaattgctaatagcttcaagtagttctggcttaccagcttgaggagcataatgggaatcattagcctgaatatcacgaattgcggcatctttaatatgatcaggtgtcgctaaatcaggttcaccaatagttaacttaataatcccagaaatttcagagaccttttggtcaaatgctcgaattttagatgcggtcaagttgtttagtctctcattaatagttgaagttaaatcactggataaatttggcatatataaagttcctttctgtattatataaattttaaattactcattaatataaaacaactatttttaaagcaacttgtaaattgaacaaaaaataggaaactgtcaaatcttttgtgtaaatagttctttctcgtaaattgattttttaattatttatttaatcaaagtaggattctaaggtgtcctgaacctgaccaaagcctttatgaattcgattgaaataacggtcattgtagctcattgcctgaataccaataaaagcatcaagcgactgttcagttggaaattctgccttaggcttagctttacgcttgatgacgttgttaaaggattcaatcatgttggttgaataaattgaagctctgatttgtttgggataattgtagaagaccagcagatcgggctcaatttccctcaaacctttgataacatggctataagctttattccattttgcataaaattcatgcaagacagctgcagcttctttttggcttgtctgttgatgtatctgcttgaattcgttcatgatcttttcgcggtcatccacccggactttagcacagatattgcgcatgacatgaaccaagcagcgttgaaaatgagctttaggataagtcctggccaaggctgttttcatgccaacaacaccatcagaaagaaagagttcaacttgcttcaagcctctggacttcatgttttgaagcatctctgtccagacttcaatgttctcactaggagcaatgcagtaatcaatgacttccttatgtccattaggtttaatgccaatggcaatatagactgcttcacgctcaaatgtttctcgatgcaaaggaaggtatgttgcatccaaatagatgcagaaaaacttgtcgcttagcttgcgcttgtgataagcctcaacctttggaatcatctgcttggaaatatttgatacctgagctggactgtaatggctgccatacatcttttcaattagatcggctatttccctggtggtcacgcccttggagtaaagcttgataatcatgctttccaagatatccgagtgctgcttgtagtcaggcagcgtgtgctgatgaaattgaccgttgcgatcccgaggcacttgcacttcaattgggccaaattgcgtatcaactttgcggaaataagcaccatttctagagttgccagtattccagccatttctggcatagggatcatagcccagaaaggcagtcaattcagcttctaacaagttattaacagcctgttgtagctctttgcgcaataaattatttattttgtctggattgaatagagcttgagcaaaatctttggtaaaatcattcatgaaggagttcttctttctgtatgtgtttttttgttcaaaccaatcatacgagaaaggaactcctttttctaatgtttaaagaaataaatttaaggaatcattcatccttacacaaactattttacagtctcaaaaatagggaagatgaaactaatcatttccctatttgtttttaagaacagtattcaaattagtataaattgctggcttaggctgagatttatctggcatttgcagccaatgaggcaaaattccatttaaaggttgaagtggccttttagtgggctgatgcaactcaagcttcctatcaacaatcttgattgtagtggcacttttatcacgtggtacagaggatgattgtggtttagtgcaggccgataagctaagtaagaatatagttagtaaaagtagtttttgcatatttttcaatttttcctccaaatataactcccaacacaatattctactatttaagcctgaattgtcaaattaagtgcaacagttaggctatgaggaaatatattgcttgaagagttcttctgctgtgtgatattgaaggattcgacgatgtttgcggttaatggcatcagttgcctgttgaacataagcagctgacttatctttcatgcttttgcctttagggaagaattgacgcagaagtccattgcagttctcattggtgcctctttcccatggagaatatgggtgggcgaagtagatctggcagcctttgatctcggtcatatccgcaaactcagagccattgtcaaacgtgatcgatttaaaccaggcaggatgtctgtcaatctcattttgaagcagcctttggcatgtgcttgcccgatagtcaggaatcttgataactacttcaaagcgtgtggttctttcggtcaaagtcattaaagcaggctgattcttgcgtctgacgcctttaaccagatctccttcccagtgcagcggcgtttttctgtcttcaatctctttaggacgctgttcaatggaattgccaagatgcttcttgtgcaaagcatgaccgctatggccgtgatgacgcttgttcctgcgtcttttgagcttcataggcagatcaatattgcttatgtccagcaagccctgatcaatatagcgatagacagttggtgtgctgggacaagggtagcctggcatagtccttttgaattcaccaacgaattcatcgatgctggtggcatcaaatttagctttaaagcgtctggagagcattctcaaaaagacagcataatgcttcaatggattgcgctgatagcagtttttgcgacgcttctcataataaatctgtgcagtatcagcgtaatagtgctcatacaataaatagctgctgtctctttgcaggacacttccgcgtttgatttcgcgactgattgtcgacttatggcagccgacttcttgagcgataacagtacgggaagttatgccggaatccagcattgcttgaatttgtccacgttgtacgctggttaattgatgatagtgcttagaaatgctagaatttgaattggtcataaagatcttcctttcttgatttttcgtcacttcaagtttaggtcttcatggcctttttgtttaacacttagtgttgcacttcaattttaaatccgggtctactatttaagtggacaatgataaaataaaaataagtttagatgacgaggaatggtaaaatgagtcgaataacaatttatatgacaggtggaatcgctgattataaggcagttaacgttatccgcgatttagaaaaagcgggtcatcaagttcaaatagtaatgactaaaaatgcagagcattttgtaactactaatacactggcagctttaacaaagtatcctgttttggatgatttatggagcaaggaaaatgaggctagcataccacatgttcatctagcgcgttggacagagttagctctggttttaccagcgactgcaaattttattgctaaaatggcaacgggaattgctgacgatgcagctagcactacaattttagctacaagtgcacctaaattggttgtaccagccatgaatgaccaaatgtggaataatccagctacacagcgaaatatagcttttctgaaagaacatggtgtagaaataatggagcctgcagtagggatgctggcagaaggctatgctgctaaaggacgaatgccagagccaggagcaattgtggcgtggatcaaaaatttcactgaacaacagaacgttttgcaaggaaaaaatattgttattactgctggtggtactgaagaagcaatcgatcccgtccgctttattggtaaccgctctagtgggaaaatgggcatttccttagctacagaagcagcagcgatgggagcgaaagtaaagctaatatatggtaatgtaagtatgcctttgccacaaaatcctaggattacattaattcatgtttctagtagcgaagaaatgttagttgcagtcaaaaaagaatttaagcatagtaacgttttaattatggctgctgcagtagcggattggcgcatgaaacaagttgcagatcataaattaaaaaagcaagctgatcaacaaactttgactctaactttagttaaaacgacagatattttacgcgaagttgctagccacaagcagcgagggcagatagttgtcggctttgcggcagaaacgaataatttgctacaaaatgctgcaaaaaagctatcttcaaaaggtgccgatatgattgtagcaaatgacgtttctaaaaatgtttttggcaatgatgaagaccaggtaacgattttacaaaaaaataagtcaactaagaaatggcctaaaatgagtaagcgaaagattgctcaaaaattgttgcagcttattgctcaaaaaatatagtatttgcatatagctaatagtgaactatatgatttatattgctcttgtaatcattttgtaatataacatctagactttttaaaaatgtgatgaaaactataatgtgaaaactaaaaataatatttagtaagtaaaagatgttttttatccttgtttaaatgataaatgctggtattataggtgttgggaattaagagactgaagagaaagagttgataggacatcatcagccctttctttttttatacgaaaatattaattttgtatagaataataaaataaattatttgataatctttataaacctagcagcattgattgatgctactattttaattagaaaatataacagaaccacaaaaaataaaatgtatgtataggatttgcaacaattttgttgtatgctattaacagatggctgaaaaaaacaattattgtttaataattgttattagctatataaatacaggaattaagaaacagagacatattagtaaaatgtagaggtgtatatatgtactctgataaaactttaatgctcaataacggagtagaggttcctcgaattcaactaggaacttggctaattaataacgatgatgtacgaaaagtaattcgtcaagcgattaatgttggttaccgcgctttcgacactgctaaagactatggcaatgaaagtggtgtgggaaaaggtatttggaactctgatgttgagagtagtgatattttttaacaactaaattaccaacttcgattaaagactatgaaggtacaaaaaagcaattgatgacgctttagatcgatttagtttggaatatattgatatgttgttaattcattcaccacaaccttggattgaagtgaatagaattaatgatcgtcactttgaaggcaatctggaaaactggagagcaatggaagaagcacttaaagccggtaaagttagatcaattggtgtttcaaattttttacaagaagacgtagctaacattgttaataacagctcaattaagccagtagttaatcaaatcgaagttcatataggaaatgtgccaactgatttgatgaaataatgtaaaaatttaggaattcagattaaagcatattctccacttgcacatggtcgtttgttaaaggatccaagaatcaggacttacgctgaaaagtatcatgttagtccagctcaattaatgttagcatttgacttacagctaggttgtattgttttgccgaagaatgataatgttaaagaaatgcaggaaaacttgaacatcgattttgaaatcagtgctgatgatatggctgatttggtcaagttaaaagaaaatacgcagaccatggctgtttaataggagcatcgcataagcggtgctttctttgttttaagggaaaaggtaatggaagaaattaagctaatcgcgatagatattgatggaaccttagttaattctaagaaggagattacaccagcagttaaaaaagcaattttgactgctcaaaaacaaggcaagcaaatcgtaatttgcacaggtcggcctttgtcaggtactcaacgttatttagatgaattagggcttaatggccaagaaaatcagtatgtagttagttttaatggtgcagttgtagaatcaaccgcggggcaggttattttcaaacaggggctaaaatatgaagattatgtagatttagagacaattgcgcgaaagctaaacttacattttcatagcgtatcgttagatcgaatttatacagctagccgtgatttgggacattatacaatttataattcacgggtcgtaaaattagaagtctcatatcgtacacaagaagaaatgaagcagataccaatcatcaaatgtatgtatgttgatgatccagactatttagatgataaaatagaatctcctttatttgaaatgatgaaagatcgagttgtattttcaaagactgagcctttttattatgaagcaaccgctgccggtgtcgataaggggactggcctgaaaagactatgtgactacttaaaaatagatcgaagtaatgtgatggccctaggcgatcaagcaaacgacatgccgatgttaacttatgctggattaggtatcgcaatgggaaatgctgttgaatatacaaagcaacatgctgacgaagttacggctgattgtgaccacgacggtgttgcagttgcaatcaataaaatattaaagtagatgttttctctttcaaatagtggtatttttactttaagatgaaaattgaatagaggtctaaaaataatgaataaagcaaaagttttagttttaggtggcttaagagatgaggccttaactgatttaaaaaatatttgtcaagttgatatcggtccagtaggacatcgaccagaagatgatcgtgagtgggtgcttgatcatattgcagaatatgatggtgtgatcgtagcaaagatggcttttgatcgagaaatgattgatgctgcgaaaaatttaaaaataatttcaacttatggcgttggctttgatcacgttgatgttgaatacgctaaagaaaaaggaatagttgtttcaaattgccctaagagtgtgttgcgtccaacggcggaacttgcctggacaatgattatggcatcagctcgtagattgcattattatgacgatgctttgcgtgaaggcgtctttttaaatgccgatgagtacgacaaccaagggtactccattgaaggaaagaccttaggaattgtaggtatgggtcgaattggtcaacaagttgctaggttcgctaaagcatttggtatgacaattatttatcataatcgtcatcaagtagatgatcaaattgcagcagaattagatgctaaatatgttgacttagatactttggcaaaagaagctgattttgtgagtttacatactcctgctacagctgaaacatatcatctggttaattcagactttttaaagaaaatgaaagacacagcgtttttaattaatgttgctcgtggatcgttgattgacggggatgcattaattgctgcgttaaagaatggttcaattgcaggcgccgccttagatgttttcgaaaacgaaccacatccaagacctgaattggttgaaatggataatgtgatcatgacgcctcacgttggttcagctactcacattgctagatttaatttgtctaaagaagctgcgaataatgttttgtctttctttaaagatggtcaggcaattaatcaaattaactagttcaaacagagctaaaaaagacgattcatgcgaatcgtctttttctttacataatttttactgatgttaatcatgatcaagctgactatggtggtagccataaataaagtaaattacagcaccgatgattaaccaaatagctgccattaagtaaacttctgaacttaaatggcaaatcataaagatacaaattaaaccagaaatgattggcaaatatgggtatccgggaactttaaagccatcgttaacaatatctgttctttttcttaattttagaattccaaaggaaacaagagtaaaggcaaaaagtgtaccaaagttgaccaaattggctagttgatcaacggagaagaatgctgcacctgctgcaataataatagtgacagcgactaaggcattttgaggagagttatgttttttatctaatttactgaatgcactaggcaatagcccatcacgtgccatagcatagattaagcgagagcttgaatagatcattgtcagcatcatggtagccattcctagcatagcaccaaatgataataactctgctacccagttttgatgaacatattgcaatgcaaaagcaacgggattagatacgtttagcttggtataattaaccatacccgttaaaacgattgaaacgccaaaataaagtacagctgcaatagctaaagtgccaataattcctaggggcatatttttcttaggatttttaacctcggcggctgatgatgaaacaacatcaaagccaagaaaggcaaagaagactgtggttgctcctttgatgactcctgaaaaatgatatggcaagaacggatgatagttgttaggtttaatgaactgtaagcctacaaaaataaaaattaaaataatggcgattttaataaaaacagctacgacattaattttaattgagttcttcatccctcgtgacaacaggatactgataagtaaaatgattaaaacagaaaccaagtcaaaataaacgccattgttaagattcataggaccagaaatagcgtgtggaatttttagaccaaatggtgcaatgaaagaactgaagtatgatgaccaacctgctgccacagtggctacagatagcatgtattccaaaatcagtgcccaaccgataatccagcctgtaaattcgccataaacgatattcccatatgaataggcagaaccagctactgggatcgctgaagcaaattctgcataacacattccagctaaagcacaaacaattgctgcaacaacaaaggataaactaacgccaggtccagttaatgtggctgcaacagttccgggtaagatgaaaataccggtcccgatgacagctcctacgccaagagacattaaatcaacggcgttcattgttttggagaacttaatgtctttaccgagatagttctcaacattttgtttcctaaaaatattaaatttcattcgcaaacttcccttattatagattagattaattttacatgatatttttaatttttaaaagaagaaaacgctctatattttttatagagcgtttgaattaatcagctttaattttttgcttataccatttacaggaaaaatatattaaagcaattagaataagtcctccaataattaatgagtattcttcaaaaattaacacaatttgttcccaattttcacccatataggaaccaagaccaactagaatagcattccagagtaagctgcctaagctagtgtaaataaggaaattaggtaatttaactttggctattccagctggaattgaaattaagctacgaactacagggatgcagcgaccatagaagattgcaccggtaccgtatttatcaaaccatctgatagccttttgtacatcaccctttttaaagccaagtagtttgaataacttatgatcgaacaacttttctaatcgatctggattaagtaaagtgccaatccaatataaaactagtgcaccaactaccgcgccgattgttgaagcaataattacaccgaagacattcatttgagaatgatgggttgcaaagccagcgaacgatagaattacttcggatggaatagggggaaagatgttttcgattgcaattagcaaactgatggctaggtagccaaattggttaattaagtcaaaaactagattagtcatcaaaagttctcctcaaattttatttcttttaatatatcaacttttgtaccgaatagctatttctataagcaaagttaagatcttcttaaacagtctgtgttaaactattaaatgcaaattttttcagtgagatgagataatggcaacacaattaattgagaataaactaaaacttttaccagaaaaacccggctgttatttgatgaaagatattaacggtacggttatatatgttggtaaatctaaaaatttaaaaaatcgggttcgctcatattttaagagtaaacaggttggacgtcgtgctgaattagttcgtgaaattcgagattatgacatcattactgtatcaactgataaggaagcttttttacttgaaattacattaataaaaaagtatcaaccttattataatgttcaattaaagcagggtacgggatatccttacatagaaatcacgcgtgaacatgatccgcaaactcggttaactagtatcgttcataaggatggtggctactattttggtccctatcctaatgtatatgctgcccaggccactttgaagtttattcaaaaagtttttccactaaggcgctgtcatggttatcaaggcagaccttgtctttactatcatatggggcagtgcttaggtgcatgctttaaaaaagtgccacaaaaagaatacgaagagcaaattaaaaagatcaagagctttttgaatggagatattgctagtgttaagcagagtttgaccgaaaaaatggctcaagcagctagcaatcttgaatttgaacgagcagccgaaattcgcgaccaattgaaatatattgaagaaacggttgaaaaacaaaaaattatttccaatgataatacgcagcgtgatatttttaattattacgttgacaagtcttggatttctgttcaaatcttctttttacggcaagcaaagttattgcgtagagaaaccagaatgtttcctttgacagatgccacagatccagaagatgctttcacttcctttattgtgcaattttatgggcaaagaaatagggttttgcccaaagaaattctgattcctgaaggatttgataatgctactttagctgaggttttgaaggtacctgttagaacaccgcaacgagggcagaaaaagtcattgctagacatggcgaaggataatgctaagttaaagctagatgataagtttagattattagaactaggtaatcgaaaaactaaaggcgctcaaaaagaaatttttgatgctttaggcttaccatatggacactttattgaaagttttgatcactcccatattcaaggtgctgacccagtctctgctttagtcgtttttaaagatggtgaacccgaaaaaacagcttatcgtaaatataagctaaaaggtgaggttgaacatcaaaatggtggcgacgaagtacgcaacacgagggaagttgtccgccgaagatatggtagactgttgcgcgagcataaaagaatgcctgatttgattttgatggatggtggtcaaattcaggtcgatgcttgtttagatgttttacgaaatgaattaaatttgaatatcccagttgcggggatggttaaagatgataagcacagaacaaaccatttattatttggcgatcccatcaacggtattcctttgaaactgattccccttaatcccaaatcagagggcttttatttaatgacgcgcgttcaagacgaagtgcaccgctttgcgattacttttcatagaagacgccatgctaaaaatgctttgtccagtcgtttagattcgattaagggaattggtcctaaaagtcgtaacaaattattgcgcgaatttggttcattgaagaaaattaaagaagcttcaattgatgacttgcgtagagcaggattaacgcttactcaagcacaaacggtaaaattaacattgtaatccgagaaaacgcgatatcatgcgtatttctgtggtatagtattaaaagctagattaagacggaaggaagagatatacatgcctacatttgttgatcaaactaaaatcgaagtacaagccggaaaaggcggcgatggcatggtggctttccgccatgaaaaatacgtccctaatggcggtccagccggtggtgatggtggccgtggcggcagtattatttttgttgctgacagcggcttaagaactttgatggattttcgctatcggcgtaagtttaaggcggatagtggtgaaaatggtcgtattaaatcacaatatggccgtgcagctaaggatctttatttaaaagttccagttggtactactgtatatgattatgacactaatgaattgattggtgatttaactgaaaagggccaagaactagtcgttgctaaaggtggtcgcggcggtcgcggtaatatccattttgcaactagtgttaatactgcaccagaaattgctgaaaatggtgaaccaggtgaagatcgcgttttgcgcttagaattaaaattattggctgatgtcggcttagttggttttccgtcagttggtaaatcaacactgttatcagtaacaactaaggccaagcccaaaattgctgcttatcaattcacgactttaactcctaatttgggaatggttatcttgccagatggtcgtgacttttcaatggcggatttgccaggattaattgaaggagctagtcaaggcgtaggcttgggaattcaatttttacgtcacgttgaaagaaccaaagtaattctacatctagtttcaatggatcctaataatggtcgtgaggcaattgatgattaccataccattaaaaaagaactcaaaaattacgaaacagatttatcaaagaagcgagaattgattgtagcttcacaaatggatattcctggtgctgaggaaaaactagctgagtttaaaaaagcattaaaagcagaaggaaataatgaacctatttatgagatctcaagtgtaactcataaaggcgtagataagttgatgtcagatactgccaacttagtaactgaagttgaacaagaacaggctgaagaacaacctaagctagcacaaaagattaaagaatataagtatcaggcaccacaaaagaatgaatttacagttgagcaagttggcgaacatgaatttatcgttaagggtgaacaattagaaagattagttcaaatgaccaacttggatcaccaagacggtattatgcgtttagcaagaaagcttaagcgtttaggtgttgatgacgcactacgtgaaaaaggagctgttaatggtgatgatgtggctattggcaagtttgtctttgaattcgtacaataagagtagagatagggtatgaaaaaaaataggtttattacggggtattctggccttagagccttagcagttatcggagtaattctttatcatttggatcctaattcctttatgggaggatatctgggagtgccgatttttttcgtgctctcaggatatttggtgacagatcatatgtttaattcatatgataaaacaggatcatataataatcgtcatttttatttgagtcgaataaaaaagttatatccacaattaattactgttttatggttaagtgcagcctatatctttatctttcaacgaaatttactggctaaattaaatcaggttgtacttgcaaatctattaaatgtatttaatttttggcaaattcataatggtcaaagctattttgagcgttttgcagctaatgaatcaccatttactaatttatggacgatgtcaattgaaggccaattttatattgtttggccaattgtcatttatttactagttaaattggttaaaaagaaaaaaaatattttctggattttagttggtctatcagctgtttctgcattagaaatggcaatcctatactttttaaaggctgatattaatcgaatttattatggaactgatactcgtttcttttctttaggattaggagcagcattagcagttgtttggccgatagagagtttaaatcagcaagttgaacgaaaagtaggctggatactggacttggtgggccttgcttcatttgctttaatgttagcaatgtttttctctaagtggatgaatccacaacaagcctttacttactctggcgggatgttgttatttactttagatgtatgtattttagtagcggtaattgctcatcctggtagtcattggaatcaaatcctaactaataggttatttgattggattggatcgcgaagttatggcatctatctgtatcaatttccagtaatgatcttttttgaagataaggtaaatattggtgataatccaatgctgtatcaccttattgaagtgattttaattttagtgattacagaaattacttatcgtttgattgaaagaccaatgggtaggattacctgggataaaacgaagcaatattttgctcgaatttttaattttgaaacaaaagattactttaagaaaggtcaagcagccttagcagctttgattttaatcttaggatcagcagctattgctatttcaccaggagtaaaagcagaagactttaataaaagccaattagcacagcgaattaatcagaattctaaaaaacaaaaaacggataatgctaaattaattgaaaagttaaaaaaagaaaaaaagaaaaaagaaaaaaaatctaaaattattcgtgaagctgagcttcaaactaaaaagcatcctattaacaaatcctttgttaaatatggtatttcccagttagatttgcaatttgctcaacatgttcaagtaactgcgattggcgactcggtaatggccggttcgagcaacgatttaaaacgattaatgcctaaagcgttaattgatgctgctgtttcaagacaattgaatgttgcttttggcttattagatagttatcaaagtcaaggagttttagcagataatatcttaatagggttaggaactaatggacctttctcaatggaagatcttgatcgaataatgcatcaggctggacctaagagaaaagttttctggattaatgttcacgttccaactagagattggcaaaattcagtgaataatttgctaaatcaaggtgcaaaacggtatcataatcttataataattgattggtattcatactcgaagaatcatcctgactggttctacggtgatcatactcaccctaatttaaagggctcaaaatactatagtgcattagttaccaaaacaattgttaagcattcaaaattttagattagaataggattttcatggaattacaatttttaggtactggtgctgggcaaccttcaaagcaacgcaatgtttctagtgttgcacttaagttgctggatgaattgaatgaaatctggctttttgacgtaggtgaagcaactcagcatcaaattttaagaacaaatattaaattacgaaaagttaccaaaatttttatatcacataatcacggtgatcacatttttgggttaccagggttattgtcaactcgttcttttcaaggtgatgttggtcctattactatttatggtcccagtggtattgaagaatttgttagaacagctcttaaggtatctcggactaaaatttcatattctataaggtttgttgaattagctaaatcagggttaatctgtgaggataagggctttcgagtgtatacggagcaactagaccaccggatacctagttttggttttagagtagtggaggcttcacatccaggcgaattattaattgacaagttagcacagtataatgttcctaatgggccacttttggggaaattaaaaaatggcgaaaaagtaactttagctgatggtactgttttggatggtaaaaatttcttaggacctactaaaccgggaagaattgtgacggtcatctatgacacacgttccacgccaagtattgctcgtttggctaaagatgcagatgttttagtccatgaatcaacttttgcaggggatgaacaaaaattggcgcatgattattatcattctacttcggttgaagcagccaaaattgctcggaaagataatgttaaattattatgtctaaatcatatttctgctcgttatatgggtgctaaagggaaaaaactcgaaaaacaggctaaaaaagtattttctaatacagtattagttaatgattttgatcagattaatattccaatgaaaggctcagaaaaatgaaagactcattaagaaataaagttgttgtaattacaggtgcttcaagtgggattggacgttccattgcccttgaaagtgctggtcgtggtgctactgtaattttaattgctagaagaaaggaccaattagatgaaattgcagcagaagctaaagaactatccggtgctgaagcatatgtttttccaacagatatgggtaagccggaagaaattgaacaaacctttaatgcaattactaaacaagtaaaacacattgactttttagttaattgtgctggttttggtaaattcgaagaatttatggaccaaaaaatgcaagacgttaccaatatgttccaagttaatgttttaggtttgatgtactttactcgtttagtaggtagggtcatgatggaacaaaagactggtcaaattattaattttggctcaattgctggcaaggtaccaactaccaagtcagccgcttacagttcatctaaggctgccgtaattcaattttcaaatgtcttacggctagaattaaagccatttggtgtcaaggtaatgactgtaaacccaggaccagtttatactaatttccttaatgtagcagataagactggaaattatgtcaaaaatgttcaagaatttatgttggatccagatgatgttgcttggcaagtagttcacttctttggcagtgataaacgtgaattaaatttaccacttagtttagctgtagcggctaaattgtataatctatttccatcgattggtgataagatttccttaaagtttgcttctagaaagtaaaaaaagatggaaaaacaaagaaatttaattattggatcagttgtggctttaattgcagtaatttttgttgttttaaatacatcacctgtcgcaattaattttggcttttttaaggtgaggttaccactaattgttgtgttagtggtaatggtgattatcgggatgattattgcttggttctttggacgagatactaaggaaaaaacggatcacaaggtcactttcttcaataaaaaagagaagaaaatagaataaatcttgatttattagcaattgaatagtatgattgaactacgtgagtgattcggggttatatgaccctgaagcttaagactacaataaaggagatcaaattaaatggcagttcctgcaagacatacttctaaacaaaagaaacgttcacgtcgtggtcacattaagttgagtgttccagcaatgcactatgatgcaactactggtgaataccgcttaagccaccgtgtttcaccaaagggttattacaagggtcgtcaagttgtaaataacaacgacaacagcaataactagttaaaggacacctttgatatggtgtctttttttatgcctagaaaaaggaaaaagaaataatgaagttagtatttttacattctagtgatacacatggatttttattgccaactgattaccaaaataaaaccgactatcatgctccttttagtttgagtagagttagctcagttattaaatctgaaaagaaaaagtatggtgataacaatgttgtagttaccgatgcaggtgattgtttgcaaggctcaccacttgcttcctatgctcattcaactggcgattatagtgatttacgtatttttacgcaagcttataatgcagtggggtatgatgctcgctgtttaggtaaccatgattttaactttggattagattatttaagctactatgttgataacaatgaggcaccaatcattaatgataatgtactggatgcagaaacagaagttccattttttggtagagaatacactattatcaagagaaatggcttaaagattggtttattggggattacaacgcaatatatcccacattgggaacctaaagaaaatgtaaaaggcttaaagtttgcctctgcttacgaaaaaattaagcattatgccaaaatattacgccctcaggttgatattttagctgtgatgtatcatggtggctttgaaagtgatcctgaaactggtaaggcgactgaacctaatcgtggtgaaaatgaaggttatcagattttaaccaaaattccagaagttgatgtcctattgacaggtcaccagcatcggcgcttaaatttggttacacgcgatactgctattgttcaaccaggttatcgcggtgaagctgtagctgaagtggttcttgatattgatgatgatactaagaaaatcaaatcaatgtccactaagttgattgacactaaagattatgatcctgatcctgtaattgttgatattgtatctgacttggataaaagaacacaaaaatggctagatcaaccaattgcacatttagataaacctgctcgaattgaaaatgcaatgaaaggcagaatagaaggcgcgccatttattaatttaatccagcaaatgcaattatggtttactaaagctgatgtttcggcaactgcagtgatgagtgagactgctaagggatttgataagaccattactatgagagatgttttgttaaattatccgtatgctaatcagttgtgtcgtgtgaagctgactggtaaagaattacgtcatattattgagcactctgctggctttttgaagaaagatgaagcaggaaacattggctttattgatcgatggattaagcctaagccaatgttgtatcattttgacgtcttttatccagtcgaatatgaagcggatttatccagaccagtaggtgaacggctgactaaactaactttgcacggtaagccaatcaaagatgatcagatttatcatttagcagttaacaactatcgtgctatgggtgggggattttatcctgaatatagtatggacaaaattgaaaccactttggataaggactatgtacaaatgtttagcgaatatttgactcatggaccagtcgaagtagatacaaaaaagaattataagttttactaaaccaaacgaaaaagacgtgagaataaaaacatctcacgtcttttttgaatagattgaataattattttaacttactgtatttactattatctttgtgtgaacgagcagtaatagtcgcaataattgctgagaaaagaataccaaaaatgatcccaacgattacacaatttcttaaatctgtgccgttgaatgaagcacttcgggttaaaggaccagcaataaagcctacaactaacatgtagattacgctccatacagttgtgatgatataacgacccataatgattccttctttcgtgtaagattttatcaaaaatgaagcgcaaattcaaacctgattggttcaatttggtatacttaatttaatgtttgtaatgacgaaaggtggttaatttatgcaagtagcagcacttcaaaacataagctcctttacgcttttaagtagtccaaccaaggtaagtgatttgataaaagacgctaaagagaagggctatcctgtggttggtttagccgacgtgaacgtgacttatggtttggtcaatttttatgagttggctaaaaaggcgggaattaaaccacttcttgggatgcaactgcgtttaaatggtttggttgatagcacccaaaaatatgatttgctagtttttgccaaaacaaataagggctatcataatttattgcgactttctagcgcggtaaatttgttaacggaaaatgggcaaaacgataaggtcttaacgctgaatgaattaaccaaatatttagatgatttgttgattatcgtaccagctaatctaaaaagtgaattaatggcgctgcatgatacaaatcaggcattaggcagtgattatgttcgccaactaaagaagttaacgtttgatctttatttgggtgtatatgcttcaaaagcaagtatagattacattgattatgtccgtggattagctaagcaatttgaattatctttagttgcagtggaagatagtcaatatttacggccacgtgagcaatttttacaaaaaactttgcgtgcgattgctaagggagataaattgcaagatatattgccactagctaagcaagctggttcgcattatttagattctgcacaaaatgttttagaacgctatcatcaatatgacttggatgatgcaattaataatacttggaaaattgctcagaaatgtaatgctgaagtgatctttcaaaaaccggtcttacctaaatatcatcaagataagtttccgacttcagaagaatatttgcgttatttggctcaaactggtttacaagcgcgctttggtcaaaaaagtattccagccgagtatcagaaaagattaaattatgaattacgagtcatcaatcagatggggttcgatgattattttttgattgtatgggatgtaattaactattgtcaccgagtaaaaattactactggtccaggacgtggttcagcttgtggttcactggtttcatactctttgcgtatcactgaagttgatcccatccaatataatttactgtttgagcgttttttaaatccggctcgtcatgagatgcctgatattgatctggacattcctgatattcaacggaatacagtaattaagtatatgtatcaaaagtatggcatggatcatgctgctcaaattttgacttttggtacaatggctgctaaacaagtattaagagacgttggccgggtttttggcttaacaggaccagaaatcactaagtggactcacgcaatcccgtactctaaagataaaatgggattaaaaaaagcatatcaagagtctagagaactaagattattggttgatgcaacgcctgagaataaattgttatttaagactgctttaggacttgagggattgccaaggcattattctattcatgcggctggattggtgattagtgatgattcgattgctggcatttcgggattgcaggctggtcctttcggcattcctgtaactcagcaaaccaaaaaatatgttgaatcattaggtttgctaaagatcgactttttgggattgcgcaatttgacagttttaggcaatattttagctttagtgcggcagcaaggtgtaaagctagatcctaatacaattccgttaaatgatcccaaaacaatggaactgtttcaacaaggtaaaacagatgcagtcttccaatttgaatctggtgggattcgtggtgttttgcgtaaattgcatcccgacaattttgaggacctagtagcggtgaacgctttataccgtccaggtccaatgcaaaatattgacgcatttgttgcaagaaaaaatggtacggctactgtgcattatcctgatcccagtttaaagcaaattttacaatcaacttatggaattttggtttatcaggaacaagtcatgcaaacagctcaaatcctggcaggattttcattgggtgaagccgatattttacgacgtgcgatgtctaaaaagaatcagaatgtcattgagcaagaacgtggaaaatttattgctggtacggtcaaaaaaggtcatcctaaagaagtaggtgagcgagtttatcattatatagagcaatttgctaactatggttttaaccgttcacacgcggtggcatataccaagattgccttttggctagcttatttgaaggttcattatcctgctgcattttacacagcgatgctcaattcatcaacgtctgctaaagcgcaaagctattcgatgcaagctcaggaagctggagttcgtattttgccgcctgatatcaatcacagccaattagactatactttacaagatggcaagattttagttggtttaaaagcaattaaaggattacgtcttgattttgctaaggaaatagctgccaatactaaaccgtataagtcttttaatgattttttgcgtagaatcgatgctaagttcttacaagtagacgcaattgaagcattgattatggctggagcatttgactcaatcgaagataatcgcaatgagttattgcttaactgcaaagatgtaattgctaatgtgcaattaacgggacaaaatatgtctttatctgagattctgggggatgcaccacttaagcctgctgagccaccgactgctgcccaaaaagcagaaatggaagagaaagctttaggctttactacaacaactactcctctaatagctgtacaaaaatatgcacaaaaatttaacgctagaccattgaatcaatttcagttaaatgatagtggtattagcgtgggtaaattaatgaagttaaagcaaattaggaccaaaaatggaaaaacaatggcttttgctagttttgctgatacatctagcgaacaagaaattattatttttccaccggcttatgaaaaatttggctctattttaaaagaaggagatatttatttactaggagtcaaggttcaaggtgatcgatttgaccaaaataaaaaacagtatttcttaaccaatttgcgaaaagttaattttaaagaataaagttcaaattacaaagctatctttgacgatggatgtaagtgctaacaagaaactgtcaaatcttttgtgtaaatagatctttctcgtaaattgattttttaattatttactgaaaattgaaagcaccaaaatcaagctcaagtcctgtcactattgagctttcttagacgtaattagtttttatatgatctgtttcagtgcaatttgtatgaatcgtggcagttggttaataaagtcattgattacttcatctatcttttcaaaactattctgtttaagctcttttaattctgaaattaagtagaccaatgcatctacgaatctaatatcaggtaaggattcgttcattagatagaataaatctccgattgtcttatcatctgtattttgtctttcctgccaggtcaatagatcataagttattgctgtaactgcgatatagccacattggccatcatagctttgaacttgagatttatctaaagcaagatattgcttagacgtcttaaaatatgtttcaatttgccatctacgaccataaagttggatgatttcttcagggctaagctttgtctgagtagtagctaaaaccaaatacttgttcttgtttccacggttggagacaaagacgagctttaataaaaagctatgtccatgatattgagcctcaactatgcttgaataaagataatgtttctttttacggatgtttgaagcagccaaacgatcatacaagtctttaacgctatagcggcgatggcgataaatgtaataaatctttgaactcttcttgatcatgccaagtccatctaaaccgatcttctttaaaatccaaaacattcttggagaagaaaaccaagaatcgaataagacgtatttagcttctactcctaatcgtaaggcttgtctaatcaactctacagttacatcattcatctttctctgagcttgatttctccttttaccagaaattgaacgttcatcagcagtaatgggagcagctccaatcatatttttcttggttttggttgacatcaaggcaaagttaaccggcaagaaggtattgccatcgctccagcctaaagttaaaccacgatatccgttcaaatactcatgcttgtcatggtcatagactttagctagcaattcggtctttttagaaaaagaccgagccatcagcgtatcgtcaacgataaaagcaagtcggcgtcttttatcgataaatggttttaagcagccaatgagccgggctgcaatcaagcataatagtttttgccagttgattcttccatcgttaagtacattgcgagcagttctaacggaaaaacgtttgtcatccttagctctgaataaagaaagccgagcaaaatgtactgacatcagccaagagataatcatggttaatgaaacggtggatttacgcttaaaattgacttgtttagttaacttagctagaccaattagattaataaatgaagaaattaaggatttagtatcattttctgtgtcgatttgttctatactgttcattgcgcaggatctcctttactttttaggtcgacacttaaagtataacgcagagagagcctgcgtttttatttttgataagaaaaagccaagaggcgcggggaaggagcgttaatcttagctttcaagtttcagttatttatttaatcaaagtaggattctaaggtgtcctgaacctgaccaaagcctttatgaattcgattgaaataacggtcattgtagctcattgcctgaatgccaataaaagcatcaagcgactgttcagttggaaactctgccttaggcttagctttgcgcttgatcacattgttaaatgattcaatcatgttagtcgaataaattgaagctctgatctgcttgggatagttataaaagaccagcagatctggttctatgtctttcaagcttctgataacatagctgtaaaccttgccccatttggtatagaagtcatgcaggacagctgtggcttcttctttgtttgtctgttgatgcacctgtttgaattcgttcatgatcttttcacgatcgtcgacgcgtactttagcgcagatattgcgcatgacatgaaccaaacagcgttgaaaatgagctttaggataagtcctggccaaggctgttttcatgccaacaacaccatcagaaagaaaaagctcaacttgctttaagcctcgggatttcatgttttgaagcatatctgtccagacttcaatgttctcgctaggcgcaatgcagtagtcaatgacctccttgtgcccattaggcttgatgccaatggcaatatagactgcttcacgctcaaatgtttctcggcgcaaaggaaggtatgtcgcatccaaatagacgcagaaaaacttgtcgcttagcttgcgtttgtggtaagcctcaacctttggaatcatctgcttggaaatatttgatacctgagctggactgtaatggctgccatacatcttttcaattagatcggctatttccctggtggtcacgcccttggagtaaagcttgataatcatgctttccaagatatccgagtgctgcttgtagtcaggcagcgtgtgctgatgaaattgaccgttgcgatcccggggcacttgcacttcaattgggccaaattgcgtatcaactttgcggaaataagcaccatttctagagttgccagtattccagccatttctggcatagggatcatagcccagaaaggcagtcaattcagcttctaacaagttattaacagcctgttgtagctctttgcgcaataaatcatttattttgtctggattgaatagagcttgagcaaaatctttggtaaaatcattcatgaaggagttcttctttctgtatgtgtttttttgttcaaaccaatcatacgagaaaggaactcctttttctaatgtttaaagaaataaatttaaggaatcattcatccttacacaaactattttacagtctcgctaacaaacttaaatacggaaagaaagcataaattagcccaatttttgtgagcttttttgcctaaaaaatgttaatatttatgtgatgtgagaaattacacaaaataatcatgatgaggtgaattcatgaaacggattggtattttaactagtggcggagacgcccctggtatgaatgcagcaattagagctgtgacgaagactgctatccatcatgggcttgaagtctttggaattcgttatggtttcgctggtttggttgcaggtgactttgttccgcttaccacggaaaatgttgaccacaagattagtgaaggcggtactttcttgtacagtgctcgtttccctgaatttgcacaagaagaagtgcaacaaaagggtgttgagcaattaaagaaacacggtattgatgcggttatcgtaattggcggtgacggttcataccatggtgctttagccttgactcgccacggcgtaaactcagttggtttaccaggaactatcgataatgatattccttatactgactacacgatcggctttgattctgcttgtcgtactgctatggatgctatcgataaaattcgtgatactgcaagcagtcaccaccgcgtattcgttgttaatgtaatgggtcgtgaatgtggtgatatcgctatgcgtgtcggtgtagcaagtggagcagacgcaattgtaattcctgaacgttcatacgatgttaaggaaattgcagaaactcttactcgtggttttgcagatggcaaagatcatggtatcattgttttagcagaaggcgttatggctgctgataagtttaaggacgaactccttaaatatggtgactttgatgctcgtgctaatgtccttgcgcatatgcaacgtggtggctcacctactgttacagatagagttaatgctactaagatgggtaattatgctgttaagttacttctcgatgggaagggcggtttagctgtcggcatggagaatggtgaacttaatacccacgacattcttgatttgtttgacggtaaacaccaaggtgattatgcgttattggatgtaaatgaagaaatgactaaatattaatttagttgatttttggagaggatttttttaataatgaagaaaactaagattgttagtactttagggccagcttcaaacgatattgaaactattactgctttagctaaggctggtgcaaacgtattccgtttcaacttctcacacggtgaccacccagaacaccttgctcgtatgaagatggttcgtcaagtggaaaaggatactggtttacttcttggtatcgaccttgacactaagggtgctgaaatcagaaccactgaacaagaaggtggcaagttcactattaatactggtgacatgatccgtgtatcaatggatgccactaagaagggtaacaaggacatgatccacgttacctacgacggtttatacgatgatacccacgttggtggtcacgtattaatcgatgatggtttggttgaccttttgatcaaggaaaaggacgactcaaagagagaacttgtttgtgaagctcaaaacactggtgtaatcggttcaaagaagggtgttaacgctcctggtgttgaaattcgccttccaggtattactgaaaaggatactgatgacattaagtttggtttgaactatggtattaacttcattactgcttcatttgcacgtaaggctcaagatatcttagacatccgtaagctttgtgaagaagcaggtgcagactacgttaagatcttcccaaagattgaatctcaagaaggtatcgacaacgcagacgaaattttgcaagtttcagatggtttaatggttgctcgtggtgacatgggtgttgaaattccatttatggaagttccatttgtacaaaagagcctaatccgcaaggctaacgcacttggtaagccagttattactgctactcaaatgcttgactcaatgcaagaaaacccacgtccaactcgtgccgaagtttcagacgttgctaacgctgttcttgatggtactgacgcaactatgctttcaggtgaatcagcaaatggtctttacccagttaaggctgttaaggctatggctgaaattgacgaacgtactgaaaagcaaatgcttaagcgtaatactttagctcttcaaagattcgaagcttacaagggttcaaacgtaactgaagctatcggtgaatcagttgtacgtactgctcaagaattaggtgttaagactatcattactgcaactaactcaggttacactgcacgtatgatttctaagtaccgtcccaatgctgacattattgctatgacctttgacgaaaaggttcaacactcattgggtatcgtttggggtgtacaaccagtattgactgaaaagcctaagtcaactgatgacatgtttgaaatggctgctaaggtagctaaggaaaagggttacgtaaaggatggcgaccttgtaattatcgttgcaggtactccacttggtgactcaggtacaactaacttaatgaagttacaaatcatcggtaacaagttagttcaaggcttaggtgttggtaacggttcagttatcggcaaggctgttgtagctaactcagctgaagaagcaaatagcaaggttaaggaaggcgacatcttagttgctaagactactgacccagactacaacccagctatcaagaaagcttcaggcttagttgtagaagcttcaggtttaacttcacatgccgcagttatcggtttatcattaggtatcccagttattgttggtgctactgacgctactgacaagatttctgatggttcaactattactgttgacgctcgtcgtggtgctatctaccaaggcaaaatctcaaacctttaattttaagaatataatttagatagattagctaatcaaaaaatagccagcttaagtgctggctattttattttgcataaaaatctcttatacttatatgtaagaatatgtaaagtaggagatttttaaatgcttggaacagttcgtaaaggaaaaattactgacgaaaacgataaagcttattatgttcaaattgatggactgacttatgaattgaagaagatcgagattacgcaagatgatattcctaaaattggagatgaagtcgaaggttttatttatgataataaaagtcatgatcgagaaatgacacaatttttgccattcgcgcaacccgatcaatatggttggggaaaagtaaccgaggtacgtccaggcttaggcgtctttgttgatgtaggtctacctgataaagacgttgttttatcaatggatgatcttcctagagaaaaagaaagatggcctcgacgtgatgatcgacttttagtaagattagaaactgacgaaaaagatcgtatttgggctaagctagcagatgaaaatatttttgaccaattagctgctaactttccacgtggaatgaataatgaaaatgtctttgcaacggtttatgttacacgagagataggagcatttgttttaactagtgattattatcttggctttgtacatgaatcgcagatgccacgtcctatgagactaggtgagcaattcaagggtagagtagtcggtgtcagtcaatatggacgtttgaatttgagtgctttgcctcgtgcttttgaagaaattgatgatgatgcgcaaatgattttgatgagtttgcggagaagagaaaccaagactctacctttctatgacaaatcaagtgcacaagaaattaaatcatactttggtatttcaaaatcagcttttaaacgtgcggtcggtcatttgctcaaggctggattaattgaagaagataaaacagcaggtacgattactttaattaaggatccagaagagaacgataatggagaagattaatttaaaagatcaaattgatgattatttacgctatagtcaagttgaacgaggattaagtgataatacaattaatgcttatcgtcaagatttagaagaatttcaaacttttgtagaaaatgaaggtatggcttcatggccaactgaagcaagcgatgtggatgcgtttttagctcggcagcgtgatttgaacaaagcaaccagctcaattagtcgacttatttctagcatgcgtaaattttatcaatggttagctcggcaaaatattcaaaagttaaatccaatgttggaaatcgatttgcctaaaaaagaacgtcgtttgccgacagctctctctcaagctgaaatgaataggctacttgagcagccaaatactaaacgaaagttaggtatacgtgatcgtgctatcttagagacattatatgccacgggaatgagagtaagcgaattaattaatttggagttgcaggatttacatgacgatttaggcttagttcgggttcttggtaaaggcgaaaaagaacgattgattccaattagtcctgttgctcttgattggataaaaaaatatgaaaatgaagttcgtgatccgctaattttacaagtagggaaaagcgatgaacatatttttttaaataatcgaggaaaaaagattacacgacaggctatttggcagatgatcaaaaagtattgtcaaatggcggcaattactaaagatgtcacgccacacactttacgtcatacgtttgcaacacatttgctagaaaacggcgcagatttgcgagtagtgcaagaaatattaggacattctgatattagcacgacacagatctataccaatttatcacaaaagcaaattttaaatgtttatcagaagacacatcctcgtctttaggtgattaaatgctaatacaatataaaaaagattatgagaagatagcaatgggattactatcctatttacctgattttaaaaatatcgaaaacttaaaagaagaaatcacgcttaatcaggatgaaaatgactttattttgtatctttatcgtaatagtcaaaataatatggtgggcgtaataggaacccaagtatctaatcagtttgtaattattagatatttgtctttagctcctggttttcgtgagattagttatgaacggaaaattgttgatgaactaaagcacgaatatccagataaacgaataactgctgtaccagaatatacaaatttattaaaaacgatagaagaagataatggacaaaagtaacttaactttagaattaccgaattttgaaggaccacttgatttattactgcatttgatccaatcgcaaaaaattgatatttatgatatcccaattgcccaaataactagtcaatatttagaatacttgcgccaaatgcaaagcttaaatttacaaattgcaggcgagtattttgtcatgtcatcaactttattgcgaattaaatcacagtatttgttgcctcaaaacgattttgtagatgatattcaacctgatgaagatccaagagacgaattagtgcaacaattggtacaatattctgtgtttaagaaaatatctgcttattttaaagaacgtaatgaagaagtaccgattacagttgctaaagaagctagtgtatcaaccactgctaaagttcaaccgctgcctaagggtcagataactgcacaagaattagcgacgacttttacgatggtcttacatcgtttgaagttgcagcaaccagataccgcttcaattagagtagcagaaacgccgatcaatgagatgatggattttttgcatggacaattgaaacgaaaaaggcaagttagtttctttgcttgcgcggacaaaatgcagaatatctcagatgttattggcttatttttagcgacactagaattgtgtaaaaaacaattaattcagattacacaagcacgtgaattcggtgatttaaatttagaaagaattgatacgaatggcaagtaaactagcaaatttagaagctcttttgtatgtcgcaggtgacaatgggcttgaggagcaaaatctaattgaactacttgaagttgatggtgaagagctaggtcagttagtcactcgtttgcagcaaaaaatgaaggctgatccagactcggggatgcaaataattcatattgcaaatacttataagatgacaactagccaacagacagctaagataattgaaaagtattttcaaaaagatttaactaagaatttgagtcaatcagcacttgaaattctctcaattattgcttatcgacaaccaattactagaatagaaattgatgatattcgtggagtaaattcatcaggagctttacagacattgatttggcgaggattaattaaacaagacggcaaaaaagatgctccaggtcatcctaagttgtatgttacaactgattattttttacaatattttaattatcaaagtttggctgatttaccgttaatcgaagactttgaggatacaactgatggtgaggagattgacttattcgattcaaaaggtagcgcagacaaacatttagaaaaagagggatagaaaatggcagaacgattacaaaaagtaattgcggaagcaggaatcgcttcaagaagaaaagctgaaaaaatgattgtagccggtcgagttaaagtagatgggcatgttgttactaagctaggtactaaagtcgatacttttagtaatattacagtcgatgatgaaccaattgagcgggaaagcctacacacgtatttgttttataagcctcgcggcgttgtttcgactgcagaagacgatcgtggtagaaaaactgtagttgattatttcgaagatttaccatatcgtttgtatccagtaggaagattagattatgatacgtcaggtttattgctaatgactaacgatggcaaattagcaaatttattgatgcatcctaaaaatgaagtggctaaggtctatgtagccaagattaaagggattttaactcctgatgaaattaaaaccttgactcaaggagtaaagttggatcattttaaggctgcgcctgccaaggtcaaagtattgaaaactgatcataagaaagacacacaaattgtccaaattacaattcatgagggacattatcatcaagttaagcgaatgtttaaagcagtaggtcacttagttgataagcttgctcgtgaaaaatatgcctttttaactctggattcgcttacatcagggcaatatcgggaattatcgaagcatgaagttgacaaattaatgcaattgaactaaattataactgtaattaaatattcaaggttattgtcttcagggcagggtgaaagtcccgaccggcggtgaaagtccgcgacccacgtcagtggttgaatcgttagataccgatagttaaagtctagatggaagaagacaggctaaaaaaacttactacactttttaaggtctgttgctgaagcaatagaccttttgttttgggaaaagaaagtaagttatggatcaagctaaatccaagaatagtagtttaactaatgtgattgcatatgctttaattggctgtattgcttttgtagttatgaaatttgaatttccaatcatgcctggagttgccttcttaaagtttgatttttcagatgtcattattacaattggaatgtttatttttggcattgtaccgggagttattattgctttaattcgaatgttgcttagtttaatttttagtggttttgcattaccaagtcttgttggaaatctagcagcattcttagcttcaatgtcatttgcagtttcattttatttattaagtaaaaatgtgagtgcggataaccgcaagacaatgatgggcagagttaaaccaatttgtggtttggtaattgggattatcgcaatggcagcagtgatgtcattggctaatgccttcgttttgactcctatttacgcagtaacagcggtaccaaacttgcctgctattaatagctatagtgccttgttaagctttactgagaaagtttacttgggtcagttattgcatttaccatcaatgtcaacctacatttttagtattatcatgccctttaacttgttaaaaggattaattaacgctgtggctgtttacttattgtttgaagctaccttgaaaacaattaagccattcgttcgtaagagatttaatttgaattaagttatcatcccatcaattttttaagttgatgggatttttcatattcaaagcatcctaaaatatgctaaaattaatccgttaagtgaatggaggaatttttgatggataaaaagtcaaccgggccatatcagcactatgaacgacctactgaaaagcgaagctcacaagatagtcagcctagtggatcagcacgttggatagcagttattataattttagcggttattttaattgcacttatcccagttgttcatcgtttggcttcaagccattcagaaaaagctgaagaagttcaaacagttaagaaggtttcttctaaatcatccaagtctgttaagactaagaaaacctcatcatcttcttttagcaagaaaaagtctgaaaaggctagttcaagctcatctagtagttctgctactcctaagacttatttagtccaaagtggagatactttaaatgaaattgcagaaaagaatggcttgactgttgatgaattagccagattaaataatcttaaagactcttcaaatattgaagcaggtcagacacttaagttgaaataatctttcagaaaggataaaaggggtcgatgataagatctcttttttattagaatgcaagtagcagtagatggtcctgcatcagcaggtaaaagtacagttgctaaaatcattgcaagtaaattatcctttgtctatatagacacaggggcaatgtatcgtgcatgtacagtgattgctcgtaatcataacttagattatggtgatgaagcgggtatcttgaatgccattgatgaagatggaattgaattgaaatctgaaaatggtgagcaaaaagtatatgtagctggaaaggacgtttctaaagaaattagaacgcctgaaatttcagctaatgtttcggaagtatccgctttgccgaaagtacgagaaaaaatggtaagtctgcaacgtgaaatggcaggcaagacaaatgtcattatggatggtcgcgatattggtacgactgttttacctaacgctgaagttaagatctttttagttgcttcagcaagatcacgtgctgaacgtcgtttattagattttaaagagcgtggtattaaatctgaccaaacagttgatgaaattgaaaaagatattgcagcaagagattataaagattctcaccgcaaaatttcaccgctaaaaaaggcagatgatgcaattgaaattgacaccacaaacatgtcgattgacgaagttgtagaggcaattttagctcaaatcgaaaaaaaacaaaaaaattagaaaaaatagcacaaaatagtagaaaaatatctcggtttcctataaaatgggacatgatattgggaggtacatatgtcagaaaacagtaatcaatttttagacgcattaaagcaaatgcaaggagttgaggtcggagatattgtcgatgtcgaagtattagacattgaagacggccaaatcgatgttggtgttgaaaacgctggtgttgaaggtgtcattactcgtcgtgaatacacttcagaccgtaacgcagacttacgtgatttagttaagcctggtgacaagtttaaggccttagtattaagaagagccggtggcgacaaggaaaatggtgaattcttcttctcagttacccgcttaaaggaaagagaagcctacgacaagttacaaaaagacttcgaagacggaaatgctgtcgaaggtactgtaacttcatcagttcgtggtggtttaattgttgatgttggtacacgtggtttcttaccagcttcattaatttcaaaccgttacgtttcagatcttaagccttacattggtaagactatgaaacttaagattaccgaaattgatcctaacaagaaccgcttaatcctttcacacaaggatttagttgaagaagaacgtgaagaagcatttgacaaggttgcatcacaattagttgttggtgacgttgttgaaggtaaggtttcacgtttgactaacttcggtgcattcatcgatgttggtggtgttgacggtttagttcatatttcagaaatttcttacaagcacgttgacaagccaagcgatgttttaaaggttggtcaagatgttaaggttaaggtcattggtatcgacaatgacagacatcgtatttccctgtctattaagcaaactgaaccttctccatttgaacaagctacagctgacttaaacgaaggcgatatttttgaaggtgaagtaaagtcattaactaactttggtgctttcgttgaagttgctgatggtattcaaggtttggtacacgtttcagaaatctcaaacaagcatgttgacaagccaagcgatgttttaaaggttggtcaaagtgttaaggttaaggttttgaacattgacccaagtgatagaagaatctcactttcaatcaaggctgctgactcaaatgcttcttcagaaaatcataattctcgtccacgtcgttcacgtaacgaaaattcagtaaacaagaagtacatgagtgataacgacaacggctttgcattaggtgacatcattggtgaccaattaaaggaccgtaagtagtcattttataaaaaagccgacttgagtcggcttttttatttatgtttagattagtaaaggagggcgagaaatggttttaccagttgttgcaattgttggtcaacccaatgttggtaaatcaacacttttcaatagaataattaatcaacgtttagctattgttgaggacaaacccggtgttacccgagatcgtaattatgctcaagccgaatggatggggcataagtttgatttgatcgatactggtggtattacctgggaaggtggcaagatcgaggaagaaatcagagctcaagcagaaattgcaattgaagaagcagatgttatcgtgatgttaaccaatgtggtaaatcacgtgacagatttagacgaaagaatagctcatcttctttaccgtactaaaaagccagttattttagctgtaaataaagctgataatcctgaacagcgaagcgatatttatgatttctatagtttaggattgggggatccgattcctgtttcaagtagtcatggtactggtattggtgatttgcttgatcagattgttaatgattttcctgacgataaagatactgaagctgatgatgttatttcttttagcgtgattggtcgaccaaatgtaggtaagtcttcaattgttaacaaattacttggtgaagatcgggtaattgttgctaatgaagaaggaacaactcgtgatgctgtcgatacgccgtttacccatgatggtgtaaaatttaaggttgttgatactgccggaatcagaagacgaggcaaagtgtatgagaagacagaaaagtactccgtaatgcgcgctatgagtgctattgagcgctcagacgtggttttacttgttctcgatgcaagtacaggcattagagaacaagacaagcatgtggctggatatgctcacgaggcgggtcgtggaatcatcattgtcgttaacaaatgggatttgccaaaaaagaatagtacaagcgctaaagaatttgaacgtgaaattagagatgaatttcaatatttggactatgctcctattctttttgtttctgccaagacaggtcaaagattagatcaaattcctaatatggttaaagaagtctatgataatcaaaatcaaagaattcaatctagtgtcttaaatgacttgttgcttgaagcaagtaagttagttccaactccaatggtgaagggtaagagattgcgtgtttattacatgacccaagtaagtacgaatccaccgacttttgttgtatttgtgaatgacccagaactgatgcacttctcatatgaacgatttttgattaatcaattacgacaaaactttgattttacgggtacaccaatcaagattttgccacgtaaacgtaaataaaagataagcaaaatatcacaaagaccttgttgttataaggtttttgtgatatttttgtttttagggaacatgattagttgtgatcatttttccttgtttagcttaaacaaagaaaaattttttgaacattaggttcaaattcaggaggtgaattattcatggcaaataaggctgaattagtttcagaagttgcttcaaaaactaagttaactaagaagcaagttgcaaatactgttgatgctgtccttgattcaattcaagaaaaccttgctaagggtgaaaaggtacaattgatcggttttggtacttttgaagtacgtcaccgtgctgcacgtaagggccgtaacccacaaactggtgatgaaatcgaaatcccagctagtgaagtacctgcatttaagccaggtaaagctcttaaggatgccgttaagtaatagcttaactaatgtgataggacgttggactttgttccggcgtctttttttagtacaatggtaacttgattggaggtattatgagttattctgaacaattactagatgcaattcaaaatcatgatttttcacaaaacaaacaccttttaaaagaagctttagataatgatgatcccgaggtcttgtcatctttagcagaaaacctaactggcttaggttttacagatttagcaaaagaaatatatcgagctttaatagctaaatttcctaaagaagatttatttaaagtttacttggcagagattatgttaaatgatggcgatgatgacgatggtctgtcgcttttatataatgtccctgagagctcttcagcttatttggatagtctattagtacaagctgattattaccaaactaacggcttaatagaaacagctaaggacaaattaatacgagcactacaattagctccagaagaagatgctattaaatttggtttagcagagattgaatatttaagtggtaattatgaacaagcacttgagttatatcaagatttaatcaaacgtcaaagtacttttagtgaagtaaatctgtaccaaagattatttgcgacttttgccaaattaggtaattatgaagaagctgccaaagttattcgtgaacatgcaaatagtattttagatattgattctaagtatgaagcaggattagttctcttatctgtaggtgatgataagcaggcaattaagttcttagatgaagtgattgagcaaagtcctgactatgtaaatgcgtatccattattagcacaagcttatgatcatcagcatgacaatgaacaagtattgaggactgctcaagcaggattagcgtacaatgaactggatgaaacactttattcaatgggagcacgtgcagcagctaatttgaatgaattggatacagctcgtgacttacttgaaaaggggttaaaagtagcgccagacaatagtgatttacgtatgcagctatctaacctatatgttcatgaacaccaggctaaggagaatattgccttatttagtaacttagatgaggaaagcgtggagccacaggcacattggaatatggcattatcatatgaggatttggatgatattcagaaagcacagagcgaatttttactagcttatccggatttcaaggataatccagactttttgcgccaaatgataatctttttcaatgtacaaaataatgatgaaataacaaaacaactgctagaaagatatcttaagttagctccagaagatgatgaaatgcaggatctttataataatctgtaaaaaaataccacgaagtttttgcttcgtggttttattatttctaaaaaataggtgccaacagacgtgaaaagtattgtttaaacttaagccatttagattgctgattaaagtattcattagttagaagactgcaactagctaggtccttttcaaaaatttgtttaagttcttgagttaattgaagattgtaattaaaagcgttaacctcgaagtttaaggtataacttctgaagtcttgattggctgaaccaacagatgagatattggagccagaaaccattgttttggcatggatgaagccatcattatatttgtaaattttaacgccatgagcaactaaatattttgcataatattcggtagctcggtaaacaaagggatgatctggcatgcaagggatcatgatgcgtacatcaacaccgctattagcagcaataattaatgctgctaaaatggattcttcaggaattaaatagggtgtttgaatatagatatagtttttagccccagcaatgatgccctcatatcctcggcgaatgccataatgttggttatcgggacctgaagaaacgatttgcattgctacgttatcatcgttgtcaagatctttacgttcgacagtaaaagcatgtaattcgcttagatcaaatttaggtaatgcagttcgtctgatagaagtattccaatccatggcaaagcgtgtctccattaggataggtgattgacccacaacacgtaaatgtgtatcgcgccaatgaccaaattttttagattgattaacgtactgatcaccgatgttaaagccaccaatatagccaatatgatggtcgattacgattaatttgcggtgtaaatgataatttagtcgtggtgtagtaaaccaatgctttttagaagtagaaatgaaaggctgtgcttcgccaccaagctctcttaaatgattaaaaaaagcaggttttgtaccacgtgagccagagacatcataaataactctgacttttactcctttagcagaagcctcttctaaggcccgtaagacacgctttcctagattatcattataaaaagtgtagaactctaaactaatcgatgttttagcttgcttaagatcagcaattatttggtcaaacaactcgggtccactggtgaaaaccttaactttattggcaaaagttaaaatagcatcatcgttgtttaaattcagctctgataacatgcgggcacgtggtttgcgctctttttcgggtaaaagatcatgttctgccaacatagctttttgttttttgagataacgattacgcgtctctttttgagcactttgaatagcaaaaatttcgtcatgtgaaagttgacgcccaaagaaaagatatagaataaagccaatgccgggcaaaatagttaatactaacatccaagcccaagtagaaacaacgctacgatgactgcgaaaaacagtccagactgcaaaggcaatattgataatccataaaatctcgattgttctgcgaataatatcccaggttaaaatcataaaaactcctcttattttttgtttattgcaaatgtaattttaacagtaaactaaagaaaaaactatctttgtagttaaacaataatataaattatgtaaagtaatactgataataaaaaatgacattgacgatgatttgcagtcaatgtcatttttaaattttagttgtctaagttaataattcgatcaaacattgctctttcttgtttggaaattttatgagcaacttcaattactgcaaaattagggttttctagtagagttttgtgaatttgcaaagataaatcattatctaaagcacttgtagcttcgtctgctagtaaaactggacgttttgctaagattgcacgagctatttcaactctttgaatttgaccaccggatagattattaccattttgaccaatttgataatcgaggcctttctctttaacaagctctgctaatccagctgatttaattgcattttgtaactcattgttggaatatttttggcccagagttaaattgaagagcagactgcgatcaaacatgaatggcttttgattgatgtagccaaagtattcatgagatttttgccaattgctggttaaattgttttggtcaatgataattgaaccagtacttggagataattgtccagctaaaagttttaagagggtagttttgccaaaaccacttggtgccatcagtagtattttttcaccagctttaacgttaaagttaaccttgtttaaaatgtttttattgtttactgagtatgataagtctttaacttttaattcattaaaagtagaagctgattcagttgaagtaggagatcctttaaacttaagagcttgttcgactttatcccaaattggtttagttgagcgaatttgattgagctggtcaaaaatcattgtaattggattaatgaagtcatttgaaagctgaacaatcattactaaagtaccagcaccaatttgcccattgaacatcaaaattgcaccgattaggaatggaatgataaagctgaaaatatcagcaatggtaataattaatgtagaaatcgcaccttgggtgtagtttaatgctctcaaggcatcttccatttcttttgcccgattaattacataagaaacaacgggaatctgtgcgtcatatagcatagcagtttttgatccgttaatagcatcaacagtagcttgagtatattcagcgttttgcttttcccagacagcggatttgttttgaatatctttaatgaaaatttttgggataaatcccgggatgaccgtagcaataacgaagattattgttagaagccaagaattgattaaaccgacaaaaattgagattgtaaaagcagcaaattcggaaataatcattaattcatttgtaattttaagtgtttcaatttgctttaggtcattggtcattaaatttagaccatctttttgcgagtcattttgttgagcaattaaataagtaatagttttctcttttaacttcaagttaatatcacgcgtaatatcggagcgcaagtatctataagcaaagttgagaaacatgataatgattagtgatgctgctcctaatgcagcgataaaaattaattgctttaatgagccacgataatattgggcgctattaagcatgatcttcgtgacataagcgataacgacattaccacaagcacttatgcaggctaaaaagacataaagtgctagcttctttttgttagcaaacttcagtgacataaatatacctttctagaccccatcaaagtgacttattttaagtcgtttcttctttgatgaaaataatatagcatattttgtttaaaattaaaataacattagacaaaacttaaataaaaataattgggagtgacgttttatgcaagaaaatgtaatgcagtttttcaatacgttaccattatttattggtattgcaatttcttttacattctctttcaatgagatacttcaataaaagtaccaattcttttggttattatttccacagtaattagttttcttttacctattttcaatttgaaatcttgggttacttattcagtgattgtctctgaaagtgcaatgtttgttttaattgcaatattgttgagtaaaaagataaaaatgtggttagcgtggattttaggatggattgcaggatttgttttggcaatagtactacttattttgctgggaatgacttttaatatttgatacaaattgaaataaggatgataactggcagtaaattgtcaagatatcatccttatttgtttttgcatttttcccactcagatcttaaaacgccatattttacgctgtcataataaaagccttgaaaatagcgaactctgcgaatttgagcttctttttttagcccaattttttcagctaaatgcatcattcttagattgccattccaggttgttaaaccaatgtgttctaaatcaggatattcagaaaatatatcagtaatccatttttctaaagctcttgttccaaggccaccatgccaataattgggattataaataactattccaatttcaagccaaagggttgttttatcaatccagttttttgaaaccatccctattgcttggtcatttatagtaatagccttacaggagtgacttaacaaatattcagtgatcgagctttgcttgaaactagaaaaggaccggtaagcagtatagtcgttaaaatatggtgcattccatttagtccactctggcttttctgctgtaaagccatctttccaaatatcgtttaggtatcgtgaattaaagtcttttaattttaacatttgttcatctgagtcatcattttgatcatcgttagcattattcttgattagttttctgacgtaaattacagatgcaaatgccaagatgaaaattaataaaccataccagataaggcctttgtaaacatgagtttgaatttgtatatacgatacaaatattaataaagcaatgcaaatgattgatgcaccgagcgcaagtgcgtctttgatttttgttctcatatatttatctccattcgattattgtaatattataaaaatatggtattttaataataaataaaaatataattaatgtaaataaaaatatgtgaaatatgaagagactgtaaaatagtttgtgtaaggatgaatgattccttaaatttatttctttaaacattagaaaaaggagttcctttctcgtatgattggtttgaacaaaaaaacacatacagaaagaagaactccttcatgaatgattttaccaaagattttgctcaagctctattcaatccagacaaaataaatgatttattgcgcaaagagctacaacaggctgttaataacttgctagaagctgaattgactgcctttctaggctatgatccctatgccagaaatggctggaatactggcaattctagaaatggtgcttatttccgcaaggttgatacgcagtttggaccaattgaagtgcaagtgcctcgagaccgcaacggtcagtttcatcagcacacgctgcctgactacaagcagcactctgatgttttggaaagcacgattatcaagctatactccaaaggcgtaactaccagagaaatcgctgacttgattgagaaaatgtatggcagtcattatagtccagctcaagtatcaaatatttccaagcagatgctccccaaggttgaggcttatcacaagcgcaagctaagcgacaagtttttctgcgtctatttggatgcgacataccttcctttgcgccgagaaacgtttgagcgtgaagcagtctatattgccattggcatcaagcctaatgggcacaaggaggtcattgactactgcattgctcctagcgagaacattgaagtctggacagagatgcttcaaaacatgaagtccagaggcttgaagcaagttgaactctttctttctgatggtgttgttggcatgaaaacagccttggccaggacttatcctaaagctcattttcaacgctgcctggttcatgtcatgcgcaatatctgtgctaaagtccgggtggatgaccgcgaaaagatcatgaacgaattcaagcagatacatcaacagacaagcaaaaaagaagctgcagctgtcttgcacaaattctatgccaaatggaataaagcttatagccatgtcatcaaaggtttgaaggaaattgagcccgatctgctggtcttctacaattatcccaaacaaatcagagcttcaatttattcaaccaatatgattgaatcctttaacaacgtcatcaagcgcaaagctaagcctaaggcagaatttccaactgaacagtcgcttgatgcatttattggcatccaggcaatgagctacaatgaccgctatttcaaccgaattcataaaggctttggtcaggttcaggataccttagaatcttattttgattaaataaataattaaaaaatcaatttacgagaaagaactatttacacaaaagatttgacagtttcattatggctgcagtaaactagttttaagaaagtgaagatttctatgatgacatcaaaattaattataattcgaggaaactctggcagtggcaaaactacactgtctaaagaaattcatcgtcgattgccacacaatacactattgcttccacaagatacagttagaagagaaatgctgaatgttaaagacggagaaaagacatttgctttgccattattagaaaacttgcttgagtatggttatcatcactgttcttacactattttagaaggtatcttgaatgcgaaatggtatgctgatttattcaaaaaatctcagcagctttttggtgatcaaatttatgcctattattttgatattccgtttgaagaaacaatgaaacgccataaaactcgtcatgaacattcttttggtgaagaaagaatgcgctcatggtggaatgaaaaagattatcttggttttattcccgagtatgcttttactagtcagatgaatttagacgatgaagttgaaattgtgatgaatgatattcaagtagaggactagcgatggttaaaaactatattaagaccttacgtcaaaaagttggtcatgaaccaattattctaaattttgctggtggaattttggctaatagcaagaatgaaatcttacttcaaaaaagatcagattttaatgcatggggcttacctggtggtgctttagaatttggagaatcagccccaaaagcatgcgttcgagaatttttagaagaaactggcttaaaagtaagaactaagtcactattaggcgtttcaactaattttatccagcattatcctaattaagatgtggcacaggcagtaactattgaattagtagaaaaaatgtcaaaagagattagctctgaaactcttgatctgaagtatttttctaaagataaattacccaagatttttaacaagcaacaccaaatttttattgatcattactttaatgaagactatccatttattgattaagggagagggtatacatgaacaaacaaccattcattttagactttgacaaaaataagcatgcagttcttgaaccaaatcatgatcaagagccatttcagtttcatccaagattgctttacgcattcgtgccggaaaaagaaattaatgcatttttagatcaccattttcaccgtactttaggtgaatttgagtcatgttcttttaatcctaaaatttatgaagttcaaattaataacgaatttttcactttgtgtcaagcgcccttgggagcaccggcagctgtacagttgcttgaatggctaattgcttatggagtagaaaaggtgttaaccattggaacagcaggtgccttagtagatttacctgaaaatgcgatgctacttccaacacgtgcaattcgagatgaagggacatcttttcactatatgaatcctggacaacttgtggaactagattctatatttttgaaggaagtagaaaagattttagttgagctaaatatagaatatgacgagataacgacttggtcaacagatggtttctttagagaaacgcctaaaaaagtggcacaatttcgtcagttaggcgcgtcaactgtagaaatggaatgtgcagctttagcagcatgtgctcagtttagaaagattgattttgcacaatttcttttcactgcagatactttagctgatatggataattatgatgaacgtgattggggcggtaaatcgcatagtgtaggtttaaatataggtgcaaaggttttaacaaagattaaataaagaaaaaggaagaagtggaaagtaacttcttccttttattattaaattgaatgattattgtctttttttgtaaaccattttctagcaaaatcaattagcggttttacatttattactttgatgacaccattgtttaacttaacctttttgatagcagagggatgctttgcttcaaactctgtccctaattcattaaagtcatcatatgaatccatatcaatattttgatattcagtccaaatagttttgccgctttcatccagactagttgcagcagaacatgtttcggtttttctaccaattgtggattctgcatagtgcaaaactgtacacgtttcataatcagttcctaaaaagatagttttgccattattctggtacaaataatctaaaggactgtcgattccataaggaatatttaaaggttgattctgtgcaatctttactttgtttttgccccaaatagcaattggcaagtaaggatgagtacttcgaacaacatctggcaaagttctgaaatactctggcgtaacccctaagccttctgtcattgatgttgtaggattataaggtggcatagcatccttaactacttgaatcaaagatttttgtactggtggatattcccaagtggctggatcacaatttgtggaaacttgtgagggcatcattattgttccattaggcacagcttcttttaaggcttcgacaatggtttctggaccattaggaacgtaatagaatttacttagtgcagtatgaactaatacggtatcatcatctttaatatccacatttctcaatgcactcttaaaatcattttttgttgtgactgtgttaattatctcttcagacatatgtttttccttttgtgttaacttaagttttttactggcttggtctgaagcggggtactctagttttaatttcagcattatttattttagctttttgattactcatttatgatttctcttttctaatattatttatctaacagtttagcattaattcctaacaaaacggacgataatttgataatcatcgcccgtttacctcgtaaaattatttattgcgcatttttgacaaatacttttgatgcttttcttcaactttttcatctttttcaatgaagaagtaagctactgcggctaatacccctacgactactccgaccaaaatagttttccaagtgaaattggttaccatgtagcatgagataattaatgctaaagctggaataacgtagccgaatgggagcttaaaaccgttatttggaaattcattagtatgcttgaatttgattactgctaagatagatggtacatattgaataaatgaagccaatacaatgcaggataccaagaagaggtatgattgtgtgattaaaatcatagtgatgattgcactgagtaaaatagctacccaagcagcatcatgcttgttcttttttccaatccatttaggcaacattgcgtgctcattagcaagagaagcaatcaacgatggagtattaaaagatcctgcaaaagcaacgccgataacactaatcagcatccctgcaatcactagaacgtagccccaatcaccaacggccttttgaaaggctacagcaataggcgtactgtaattaaccatcttggatcctaaaatcccgatagctactaacatcattaatgcatataaaatagtcacagtgatcatcactgagatcaatactttgggaatatttttctctggattattcatctgttttgcagcaattggaataaaggagaatccagtaaacatgtaaaatactacacttaaacttcccacactaaataagccagtaatctcttgatcttgcttggctttaggcttctatattatttttgctagttttctttaacaatttttgcatgtatttgggtaaacgattgataaagtcagccgtgaattcagctatttgtgcttcactggcatgaaagacttgctttacgctggccagcattgcatcagtaatcaattgcaaggaatggctaaaagtaatgtccgccagctcatcaatcatgcaatagaacagctcgcctagcgtgcgttcatcttcatcgtcccgcttggcaactgacataagcatgtagcgagtaaaaactatggcaacatgagcggtcaaagcatcgtaagacaggccatgatattccgtacttagttttagataacttttgcaagttttgaaaaaaacctcaatatcccaacgcttgccgtagttgcggataatttcatcttcgctaagcgacatgtcggtacaaatgattgccagccaatccttgcgattggcacggtttctaacgcagacaatccgtgcatctattttagcaccgtctttgtcctggcgtccgactttgactgggattgacagcaggtagcgagaacggccgcatcgctttttacagctgcgataaatctgtttgatgtttttgcgttctccctcaaattcatatttgattttggagctaaccttaaccatggcaatcacatccagcttcctttgcttgagctggacgatttgatgtggatttgagaaccagctgtcaaacagcacgtacttggcttgatgacctgctttcatagcttggtcgattaaattaaccatcacgtctgtgcctttagtccgggcaagcatacgtctttggccagcaatggtgcgctgatcaaaaactttattttcgccaatcatattctgtagcttctgagaagacagcagcactgaattgattggcatgaaagaagctccatcagtccagcccagggtcatcatgcgaaaacctttcttgtaagtcattgatacatggtcaaaaactttggcgactaattctgttttcttgaagccggtcctagagaagtaggaatcatcgacaacaaagcaatcagcccgtttttctgaagtcaaagatcgcaagtggttattaatgatttgcgcagacagaagtgtggtgaagtggagccaattgacgtgaacgttgcgcataaaacggtaatatgagttcttggaaaaattttcttgaaaatgatccattttcagctgcatatataagctgcggtcacgaaagacattgcttaaaacgtaaagaaacaagctgaacaggctaatgcctttttccttgcggaagccacattttctcaacagcttgatcacctgaaacttcttgatgaagctgatgattgagtttgaaaatagttgttcattttgttggtcaggagatggtaaaatagacattggcacaagcctttcatgcaaataaattatgttttggtcaatataattatagcaatgaaaaggacttgtgccttttatatttgtcaaaacacgcagaatcacaatgaaacaagcaattttgcgtgtgggaagtttaagtactacactaaatgcagcaccaaaatgtttgaagtaagggccaacacctaaggttgctgctttaggaatcacaggtgtaaagttcattttatgaataaaaaaggcaccaatgatgataaaaatcagaatagtaatcattttggcagcagaggataagttatcgactaattttacaattgtccgaccaaataagttaataatcgtaaacagcacaattattccaatagctatcccgtagtaaacagcgtgattactaaaaacaggggacaaagtctttaaaatagttaacaaagctactatttctgccgcatatgtacagcatcctaaaaaccaaatatatattccaagttcgtagccagtaaatcacccaaaggcgtgatatgaataaagccaagctgcgcctgatccagtaaaacgacttgacaagtcagcataacaaagagtaaccatacttactgtaagagcagcacaaattgttacgaaaacactcatcaagttcatatctttatagattgtttgaggtagtaaaaaggcaccggacccaattaccccattaattcccaagaagtaaatagacatgaacgaaagcttcttgggagtaactgttttttggcattgttttcaacctcttgattgcttaatattgataaacgcttacaagctaagattagttcttgccatgaaagattgcaaagaataagtgttattgatcccataaataaaaatagagaaaagtgtataacctctgcattttttgttaaaatataagtaagaagattaagtaatgattaggggatgagatcatgatgaacaaaaaaattatgtatatggcaggagtagtcttagcctccttaagtttaggtgcgatgactgctcagacagttaacgcagctctaactaatccaattcgtcagggtaaaaagttaaacttgactagaaaagcaacgatttttaaccgtaaaggagaaaaagttggacatttaaaaaagggccgtgtttacaagatcctaggcattaaatcaattaatggcaataattttgtgaagattggtaagaataaattcgttaaggaaggggcatttttaccatacattaaggacacagccgagacaattaaccgcattaagcatccatcatatgtttatgataaaaatggtcagccaattccaggtaagtttgttaaacaaggctctaaagttaaaaatcttggccataaagaaattgatgaacggccattcattcaaattggagaaaacgaatacgttaaagctaataacgtattgactgtaattattaattattagtaaaagaaaagctatatcatgaaatgcatcatggtatagctttttacttgtggatgaaaaagcgatgtggttttttataagtaaatccttctcccattgcctcatttacctcaattattgaaacaaaagcatgtggatcttcttgcttgattaaagctttgattgatggaatttcccgcggtgcgactacaacataaattacacgtttttcattttgttgatagccacctaaagcttttagatatgtgaaaccacgatttagttttaaatcaatcatcttgccaatttgttcatatttgtcagagataattaataaaccacgggctgtgtatgcaccttgctgaacggtatccattactcgggataagacaaaagaagctaataatgtgtatagcatatgcttgatgtctaagtaagatagggatgcgaagagtactattgcatcacaagctaaaagcattttgccagacgaaataccaaattttatctgacagattcgggcaataatatcagttccaccggaagtaccattatatctaaatactaaccctaatccgattccagacaataacccagcagaaattgctgaaaggaagaggtcgtgttctaaatctaattgttttataataggtactgaatgccaaaaccataagaaaaaggaaagactgagcgttccccagattgtataggctaaaagacgtttgcccataaagcgatagcctaacaaaattagtggaatattcaatacaagggtcgatagtcccatgttgatgccccaaaaatgccgcagaagaagtgaaataccagttagtccgccgtcggctagtttattggggacagaaatcatgtctagacttaaagcgtaaatagcacagcctagcgcgatcatgaggatatcaattaagatacttttgtcaatcttacgcataatgattacctcctttatgtctttcctcaattttaacaaagtgtatagcaaaagtaataataaagacaataagaattgagattttaatatgataaagatagataatttaccagaaatttttaccaaggcaatgcccgtgttacagatattagaaaatgcaggctttgaagcgtactttgtgggtggttctgtccgcgatgttttgttacatcgtcatgttcatgatgtagacattactactagtgcttatccagaagaggtaaaagagttatttgataagtcaattgatacaggaattaaacatggaacggtgactgtcctttatggtggtgaaagttatgagattaccacttttagaacagaatcgggttatcaagattttcgtcgtccagatcatgtaacatttgttcaaaacttagatgaagatttaaagcgtagagactttacgattaacgctctggcaatggatacacgagggcaaattgttgacttatttaacggactagatgatctcaaaaaccatgttattcgtgctgtaggtgatccagaaaaaagatttcacgaggatgctttgcgaatgatgcgggccgtacgttttatgagtcaacttgaatttaagttagaaagcaagacccaacaggcaattaaggataatcataaattacttaaaaaaatttcagttgaacgaattcgagaagaatttgtaaaattaggtttaggaccacatgctcggcaagcttttcaggtttttcttgatacaaatttgagtgaagatgtacctgattttggcggaaaaaaagatcaactagctattttcccacagttaaaattcagtccaacgatggaaaatagtttgtggtcactgataattttgctattgaaattaccgaatgaacaaattcatcgttttatgcgtgactggaaaaactctaatgctatgactgagcaagtcgaaagaattattaatctatttgatttactttctagtcatgctcctagtgattatgaattattcttagcaggggaagagacattaattaatacgattgacgttgctcatattgttggtcaaccaatttcttcagaagctttagttgatcgttatatggctttacctattaaaaaagcgtcggaactagccgttgatgggagatttttaatagatcgcgggatgcgaccaggtgcaaaattggggcagactttgaataaaattcgagagttagttgtttcaggtgaagttgagaataatcaagaagcgattgaaagctatttgactacaattgaatagaaagaaaaatgtagcagaattcaactgctacattttttaaacataaagtaaaacggaaaagtacattaagattgaaccgagcataacaaataaatgccagatagtatggataaagggaacattgcgcatactgaacaaaatcgcgccgattgtgtaagcaatgccaccactaactaatagccagaatccagttggacttaagcgaacatataaataagatcctgacaagataactaaccatcccattgcaacatagaggattgtatcaagtatgacgtgtttaccacgattgaagatgtagtaaatgatgccaaagatggttaggccccagatcaagccaaataaagtccacccccaggctccaccaattgcaacaagtgaatatggagtataagatcctgcaatcaaaagaaagattgaggaatggtcaaaaatttgaaaaatatttttggcccgtgtaaaaactaaactgtgatatagtgtggaaaataaataaagcagtaccaggcaagagccataaattgtgaaagtaacaactcgcatcgggctgcctgtatgagctgcctttacaattaaaattactaagccggtaactgctagtccgaaaccaatcccatgagttatggcactaaaaatattatctagaaggtagtacctttctgatcgttgttctggttgctgccaaagtttgctaattttcatgaagtgtaatcaatccttttttcttctaatagttttttgatacaatacagtatatatgttgcttacattttatcataaatcgggtaaacaaattagaattgaaggcgaatacgttgtcgaagataaaagttatgacggactcttccgtccaattaacaccagaagaagttgaaaaatatgacattacagtagtcccattgacgattaccatcgacggtaagtcatatgtggatgggattgatatcactagaagtgattttgtcaagaagatgaacgaagcggagagcttacctaagactagtcagccaccaattggccgttttgttgatgtgattaaaaaattaactgcagatggcagtcaagtgattggtattttcttagctaaatcattaagtggtacgatagatgccgctcgtcaagctgcagaaattgcaggtcaaagcgataatgttacaattattgactctgaactaaccgacagggcagaaggcttccaagttttggctgctgctaaggatgctcaggctggtaaaagcatggctgagattattgatcatgttaaaaagattcgtagtactcaaaaactggaaatgatggtagttaatttacaaaacttaatcaagggtggccgtttaggtgcactttctggtcgaattgctactatgcttaatattagaatcgctcttcagatgccacaaggtaagttaatcgtagccaaaaaaggacgaggtaagaaatttacacgtgcttttgatgaacgagtgttaaaagaaatcgcagataataaagagcatattaaagaagtaggcatttcgtacgttgatacacctgaattaatggaagaattagctgaaaaaattcgtgcaatcaatcctgcaattaatgttttagtggcagagacaagtccaattatcgcaacacatgctggcaatggtgcttatgcgatcttatattatgtggagtaattatggcttaccgagaaagtttttatcgatatttaatgacgcaaagggatgcagattcagctgatgacgtagctcaatttgcgaataatgcacagcatgacctgacttttcctaagcaagaacaagattatgagaaattgtcagattatttggaattgaatgctagttatttaccaagtatgtcaatttttgatcgtgcttatcgaatgtatgaagacaaaatgatgtattaagtccaagcctgatagatgcctgggcttttttattaagtgggtagaaaaatgcaggtagtaatttttattggttttattgtctttgcggtagcatttgcgacgattattcaacaacgctttttgaagagaatatcagttaattacattgcaatggcgattggagcggctattgcactagtaccgcaaacaaattcattaattgagagctttagctcggaattatttatgggcttgattgtagcgccattactattttttgagggacaacgtactaggttgtacaatgttttacgttcgtggcgtgcaatagttgggttaacggttattatgattatcttggcaactataactgcgggattcgggatctattttagtatgggtctctctaccactggcttttattctggctgcaatttcaacgccaacagatgctacagcaacagaatctgtaacacatggattgaagctgcctaagaagattgctttttagctaaaagatgagtctttgtttaatgacgcttcaggtatcattttgcttaatatggcagttgattggtacttgcatcaagaattacggattggacaagcaataggtaattttttatattctgcaggtggaggttttttctaggagctttggtggctactttattagttttcttgcgtcaggaaagttttcgctccaaatatcatttatctgctggtgttgcaatgccggttgaagtcatattctttttgacactgttaataatatattttttagcagaagaaattcacgtttctggaattattgcagtcgttgcagccggattgattcataacgttgaatctgagcgaagcaggcttactaatgcctttattttttataacggaataattttatacctagctaatttgcttattagatacttttattatcgatttagcccttctattaaaggaaaaacgagtataaagaagcattgatttttagtctgggtggcattcatggagcagttacttttgctttagcatatacgttatatgatttacgtattaatgtagcagatttccatttaattttggtgagtgaaattacgcttattttactaagtatgattgttccaacaattgtttttcacatgatcttggacaaagatatacctgattttgatcaaagaaaggaagttgatcgagttcgtgtggcaatgattgagtatgctatggatcaaatgaaaaagatctatttacctaaaaagattcgaaaacaattaaaattcgatttaagggcacaaatgaatcaaacttctatggttgattttgctagggaaataaagtatacaattaaacaaaaagaattacccgatgatcagaaagaatttagagctgaggtatatagatatgcttttagacaagaacgtgactatttaggtaaaattgcacaacaagagagaaaatatcgtcgaggctttctggctttatatagacagattttgatgtcagaagtggtgttcttagatgatgaaaatgattaattttagaaagaagagataatatggcaacaattcaatggtatccggggcatatgaacaaggctcgtaatcaactggaagataagttaggactgattgatgttttggtggaagtacttgatgcccgaattccgcaagcttcaagaaatccaatgattgaaggactagttggtaataaaccacatattattatcttaaataaggctgatttagctgatccagttttaacaaaggcatgggcagcagaattagctggagataataagtatgttttggcacttgactccttgcacaatactaatatgcagaagttggtttccttagtaaaaaaggcggcagctgccaaaacagagaagctagaagcacgaggggcctcaaatcctactattagaattgctttggcaggtattcctaactgtggcaagtcaacggtgattaatcgtttagttggtcggaacgtggctgaagtcggtaacaaaccaggtgtaactaagggacaaagatggctgaaaacaaatgctaatattcaagtgctcgatacaccagggattttatggcctaaattttctgatcaggaagttggttataaattagctgctttcggtgcaattaaggatagtgtttttcatgcagatgatgtagcattatttgttttgaaaaatttacgtgaattttatgctaaggatttgcttaaattttctaaattacctgaacagcaaattgctgatatggctgatccagatttgcttttgtcaatgactgaaaaatatggcatgcgtgatgattatgatcgtttttcattatttatgttacaaaaattgcgtaagggtgcaatcggaaggattacgttagatagaccatgacaattaaagaaataaaagagctgttgaaatctgaggtctctgaagcccaaattaacgaacttgaggcagatccgcgggccggcgtacaaaaattgttagttagttatcgtaagcgtcaagcaaaattactagcaaaaaaagaagagtttttgcgtcgcttttcttatgaaaaaaagttctgggaaaagggacaattagtagcgggtgttgatgaggtaggacgtggccctttagctggaccggtagtaactgctgctgtgataattgatcaagattttgatttattagatgtaaacgactcgaagaaattgagcccagagaaacgattgaagttatatcctaaaattttagcggaagcagttagtgttggtattggagtaaaaagtgcagaggtaatcgatcaaattaatatttatgaagctgaccgtcaagcgatggctcaagcagtacgagcacttgatgttaagccgaatgcacttttggtagatgcaatgaatgtgccagtaaatctaccccaagttaaattgattaagggagatgctaagtcgaattcaattgcggcagcttcaattgtggccaaggtctttcgagatcaattgatggatgattatgatagaatataccctcaatattgctttcatcataatgcaggatacggcaccaaggagcacattgaagccttgaaaaagtatggccctacgccaattcaccgcaaaacatttgctccagtcagtgatttttttgaataaatttcaatttataaaaaaataatggtctctttttgcgtaataaatagtggagggctttttttatgaaaaaaacagaatttctactaaaattaaaattgcaaaaagggattggttatgttaaattgctgacaattgctaatcaggtaactgatgaaacagaaattgaatttgaagaattagaacaaattgaattaactgaggaactaatggatgcatgctatcgcgcttttcaggatgatcagttggatcgaatggtacaacaaattgaacagcagtgtgacgtaatcagttttttcgatgaagcatatccagaaaaactacgtcaaatttatcgaccacctatggtattgtttacccgaggagatatttctttactgcaaaaagaaatcattacaattgttggctcacgctatccgactaagtatagtcaagatgttattaatcgcttggtacctaatattgtgcaatctggtcaggttgtagcaagtggcttagcaaaaggcgttgatgccttagctcataaggctgcacttttcaaccaaggaaaaacaattgcggttattggcaatggtttaaatttttcatatccaatgcaaaattttgctttacaagaagagattgtgcaaaagggactattgattagtgaatatttgcctgatacaccaccgcgtccgtatcgttttcctgaacgcaaccgtatcttggccggcttaagtcaaagtataatcgttactgaggctaaagaaaagtcgggttcactgattactgctaatttagcgttacaagaaaatcgcgatatttatgcagtacctggaccaattactaatgcattgtctgcaggtcccaatcaattaattgaagcaggagctacgccaattgttgattttaaatttaacaagataaagatttgacaattcagaaagtattagttatttttggactgtacccataaaataaaataagaattaaggaggcagttaatgcctactaaagcgaaaagtaaaacaacaaaaaaacgtaaaaagaccttagtcattgtggaatcacctgcaaaagctaagactattgaaaaatatttaggaagaaactatcacgttattgcttccaaggggcatattcgtgatttgcctaagtcacaaatgggaatcgactttgaagacgactataagcctaagtatatttccattcgtggtaaaggcgataccattaaagaattaaaaagcgaagccaagaaggctaaggatgtttatttagcatccgaccccgatcgtgaaggcgaagcaattgcttggcacgtagcgcacgcattgaatcttgacgaaaaagccaagaatagagtaacttttaacgaagttaccaaggatgcagttaaagaaagcttcaagcatccccggacaattgatatggatacggttgatgcccaacaggcaagacgtgtacttgatcgaattgtagggtattcactttcaccaattctttgggccaaagttaaaaaaggtttatctgcaggacgtgtacaatcagttgccttaaaattagtgattgatcgtgaaaaggagatcaagaactttaagccaaaagaatattggtcaattgatgcggaatttgctaagggtaaagaaacttttaaatctgccttttatggtgttgatggcaaaaagaaagaattgcctaatatcgattctgttaaggatgttttggctaaaatcgataagaaaaaggactttgtagtagataaagttgttgctcggcaacgtcggcgtcagccagcagccccatttacaacttctacaatgcagcaagaagccaataagcgtttaggttatcgtactcgtagaactatgagtattgctcagcaattatatgaagggatttctttaggtaagcaaggaacagttggtttgattacttatatgagaactgactctaagagaacatcaccagttgcccaacaagaggcttctaagtttttgcatgaaaattatggtgcagaatttgcagctaagagtcaacgccattttaagaatcaagaagacgcacaagatgctcacgaggccattcgcccaacatctgtatatcgcacaccggagtcattaaagagtgtcctaactacggaacaatatcgtttatacaaattgatttggtcacgttttttggccagtgaaatgaccccagctgtttatgatactgttcgtgcagatattgttcaaaatggtgtgatttttagaactactggttctaaattgaaatttgctggtttcaccaaggtttatgataatcaacaagaaaagaatgttgacttacctgatcttgaagagggtgacaaggtcaagatgactaagtccgataacaaacagcactttacgttaccaccagcacgctatactgaagcatcattagttcacgcattggaagaaaatggcgtgggccgtccttcaacttatgcacctacaatagatacaattcaacgccgctattatgttaaacttgatggtcgttcaattgtaccaactgaattaggtgaaattgttgatggcttaattgaaagcttcttcccagatattactgatgttgattacaccgcccgacttgaaaatgaattggatgaagtcgaagatggtaaaaaggattgggttcatgttgttgacgaatactatcaaccgtttaagaaagaattaaataaggctgatagtgaaatcgaaaaggtacaaatcaaggatgaaccagctggctttaattgtgatatttgtggtgcaccaatggtgattaagatgggacgctatggcaagttctatgcttgttctcgtttcccagattgtcgtaatactaagccaatcattaaagaaatcggtgtagtttgtccaaaatgtggcaaaggtcaggttgtcgaaaagaaatcacgtagaaatcgtaaattctacggctgttctcgttatccagaatgcgactttgtctcatgggacaagccaattggcagaaattgtccaaatgatggccactttttagtagaaaagcattctaaaaaaggtccagtgattctttgtcctaacggtgattatcgtgaagacagtgaaaacgaaaaaaacaattaacatagaaaatataggtgagtaaatgccaaaaaatgtaacagttattggtgcaggtcttgctggtagtgaagcaacttggcaattagctaagcgtggtattcatgttgacctttatgaaatgcgaccaaaaaaggagactccagctcatgaaactggtgaatttgcggaactggtttgtaccaattcaatgagatcaaatcaattatctaatgctgtaggtcttttaaaagaagaaatgcgtcatttagattcattgatcatgaaagctgccgacaaaactcaagtgcctgcaggtggagcattagccgttgatcgtgatagtttcagtaaatacgtaactgacactttgcgtgggttagagaatgtaactgttcacgaagaagaagttactgaaattccgaaagatgggattacaattattgcaactggtccgttaactagtgatgctttagctggacagattcaaaaattttctggaactgatagtttacatttctttgatgcagcagctccgattgtggccgctgactcgattgatatgaaaattgtttataaaaagtcgcgttatgatcgtggtgaagctgcatatttgaattgtcctatgactaaagagcaatatgaaaagtttagtcaggaattaattaacgctgaaactgcgcaattacatggttttgaaaatagcgatgtttttgaggggtgtatgccaattgaagtaatggcagcgcgtggggctaaaacaatgctttttggtccacttaaaccagtaggattagaagatccacatacaggcaaaactccttatgcagttgtacagttgcgccaagataatgctgcagcttcaatgtataatattgttggtttccaaactcatttgaaatttggtgaacaaaaacgagtattttcaatgatcccaggcttagaaaatgcacgtttcgttcgttatggtaaaatgcatcgtaatacttatatggcttcaccagaagttttgacagcttcttacgaggcaaaagagcagcctggattattttttgcaggccagatgacaggtgttgaaggctatgtagaaagtgcaggtagtggcttagtagcaggaattaatgcagcacgtgaagctatggggaaagatactgtggctttcccaaaagatactgcgttaggctcaatggctaactacataactactacgagtgctaaacatttccaaccaatgaatgctagttttgctttgctacctccactagagggtaagaagattcgcaagaagcgtgagcgccatgagaaggtcagtgaacgtggtcttgctagtttagatgaatttaagacggaagttttagattaatgaaccaaaggcaaagtgagttagatcaatttttatcatatttacaaaatgagcgtcattatagtgcgaaaaccgttttagcttatcaaacagatttgcatgaagcggaaaggttttggcatgaaaatggtggattcccaggttggactaaagtaagagaacgtgatatccaggtttatctacaacatttagcagaacgcaagttagcccgtagtagtcagttgcgcaagatgtccagcctgcattctttttaccactttttaacccgccgcaaactagtggcaatcgatccaactcagggtattactttacgccgtggtgagaaaaaattaccgcaatttttttaccagcctgaattaaagcaggtttttgattcattgaaaggaaataagcctttgacgatgagaaatttggcaatgtttgaactgttttatgcgacagggatgcgggtaagtgaggttagtaatcttactttgaatcaacttgatttagacttacagacaattttggttcacggtaaaggaaataaagaccgctatgttgcttttgatgataaaacaaaaaaatctttgattgcttatttagaaaatgcacgtccattattacttaaaaatgatgatgaacagcatgtatttttaaataatcaaggaactggcattactagccgcggaattgaaactgtaatgcaaaaaacttttaatcaggcaggaattagtggtaaagtacacccacatgagttgcgacatagctttgctaccgcgatgcttaataatggagcagatttgcgaagtgtccaagagttattaggacacagtagtctatcagcaacgcaaatctatactcatgtaacaatggctcatttaaaatcagattatcaaaaatattttcctcgtaataaagaaagttgaggtttaacatgacaacaatttgttcagtaagatttaatggaaaaacagcaattgccggtgatggacaagtaaccttaggcgaaaaagttattgccaaggcaacagcgcgtaagattcgtcgtatttaccatgatcgtgtagtaattggttttgccggtggtgtagctgatgcagtcagccttcaagatatgcttgagggcaagctcgaaagctactcaggcgatcttcgtcgtgctgccgtggaaatggctcaagcatggcgtaaggatccaactctacaaaaattaaatgcaatgttgattgcttttgatgacaaagacctacttttaatttcaggtaatggtgaagtacttgaacctgatgaaaacgtagttgcaattggttcaggtggtaattttgctcaagccgcagcgattgccatgactcgacacgcaaaagatatgaaggccgatgaaattgcacatgaagctgtaaagattgcttcaggaattgatgttttcactgatgataaaattgtcactgatgaaatttaggagtgaaggaaatggctattaagaccccaaaagaaatagttaaaattttaaacgaatatattattggccaagatgaagctaaaaaatcagttgcgatagctctttacaaccgttaccgtagaatgcagttatctaaagaaatgcaacgtgaagtaacgcctaagaatttattaatggctggtcctactggtgtaggtaaaactgaaattgctcgtcgtttagctgatattgtagaagctccctttgttaaagtagaggcaacgaagtttactgaagtaggttatgtaggacgtgacgttgaatcaatggtccgtgacttggtttccgaagccgtacgaatggaagaaaaggaccaatttgctcgtgtaaagactcaagcaactaaagaagcaaataaagaattagttcgtttgttagctccagcagagaaacatgaacgtcgtgaaaatcaaatgcagcaaatgcaagatatgatgtctatgttgatgggagaaaataatcgcgaagaagatcatgaagaggatgtttctgctgatgtaagaaacaaacgaatggatgtggctgaaaagctagctaaaggcttacttgaagatcacgaagttaccatagaggtagaacaagctcctaaggccaacccaatgagtgacatgatgggtcaaatggggatggatatgggctcaatgcttagtgatcttatgcctaagaaaaaggttaagcgtactttatcagtaaaagaagcacgtgaagttttgattcaagaagaatcacgtaagttagttgactatgacgctatctatcaacatgctattgaaagaagccagaataacggaattatctttattgatgaaattgataaaattattgctggtaataaacgtaattctggtgaagtttctcgtgaaggtgttcaaagagatattttaccaatcgttgaaggctcaactgtaaatacaaaatatggcccagtttcaactgatcatattttgtttattgctgcaggtgcctttgctgaaagtaagcctagtgatttgattccagaacttcaaggacgttttccaattcgggttgaacttaacgctttaaccaaggacgattttgtcaagatcttgaaggatccacaaaattcattgcttaagcaatacattgctttaatgaaggcagatggcattaagttagttttcacccaagaagccgttgataaaattgcggagattgcctttgatgttaaccaaggcactgataatattggtgctcgtcgactttcaactattcttgaaaagctcttagaagacgttctttacgaagggcctgatatggaaatgggtgaaatcacagttactgaagcctatgttgaagataagttaggcgatattattatgaataaagacttaactaaatttattctctaattgatcaaagaatcacgaatgaagcattcaattcaaagtttgaatgcttttttcttttgtttttattctggcttattgacgcattaatgttaaaatataagtaattaagcgattacattatgatttttaactgtttgatatgtagagggaaatttagttatggattacacaatcaagaataatatgatcgaagtagtgatttcggatcacggagctgaagttcagagcgttaaaggagctcataccggtgaagaatatatgtggcaagctgatccagagatctggggcagacatgcacctgtactttttccaattgtagggcgacttaagaatgatgaatataagtatcaaggtaagacctatcatatgggtcagcatggttttgcccgtgattgtgattttgaagtggagaatcatacacaagaaagtatcacgttcttactgaaagataatgaaaaaacgcgtgaaatgtatccatttaaatttgaattcagagttaactataatttgatgaataatttattggaagaaaactttagcgtagttaataaatcagatgaaactatgatttttggtgtaggtggtcaccctggatttaacttaccagtaaataatggggaagagaaagaagattattatttcgatatgcatccatctattgctagggtaaaaatcccacttaaaggagcatatcttgactggaataatcgttctctagcttcgactgatagttttattggtttaagtgatgagctatttaaagatgatgccttgatttatgaattacatggtcatgacaataaagtatctttgagaactgataagagtaagttccacatcaatgtttggactagaaatgcaccatatgttggcatttggtcacaatatccaaataccgctaattatgtatgcattgagccatggtggggaattgcagatagagaagatgctgatggtgagctagagcacaaatatggtatgaatcatttggagccaggtaaggaatatcaagctggatttagtattacttatcactctgcatctgatcctgaataaaatattgaggaataaaaatgaaatatttaacttttaataacggtgtaaaaactccaatcttcggctttggaacatatagaattcagcctagaattactgaaggagcggttgtcgaggctttgaaggctggatatcggttaattgatactgctcaagcatacagtaatgaagcagaagtaggcaatgctattaacaaaagcggcattaaacgtgaagacatttttttgaccactaaagcgcaaacaagtggttatagagagacgaagaatgggattgatgaatcgttaattcacgcccagcaagactattttgatttaatgattattcactggcctatgtctgatagtttaggtacttaccaggcacttgaggaggcatatcaggcgggaaagctacgttcaattggactgagtaacttcaaccatgatcaagtaaatgaaattatgaataatttcgatactaagccagtagttgatcaaattgaaacgtctgtctttaagcaacaaaagaaaatgcataaatatttaattgaaaataatattgtacatgaatcttggtcaccactcggtgaaggaatgaaggctttatttaatgacccaaccttactttctttggctgagaagtataataagacagtgccacaaattgcgttacacttcttggtacaagaaaatatcatgattattcctggctcgacgaatccgttacacatgaaggataatttggatatttttgattttgaatttactgctgaagagatggagacattgcgtggccttgatcaaaaacgtggtattggtggctggcctgcaagtatggatcaagaattagattattaattaaataagcatccctaaaacgatcttttatggcgtagggatgcttattttgtcgtcaaattttgttcatatattgcatgatttttacaaatattgcagagaaatctagatttattaaaaatatttccaactgttacgaaaaaacatttttctttaatcattgtgtgatctgactgtgatggaactgcaactcgaagcaggtattatataaaatgtcaattgcaagagaataataaaacaaaaatgatgaatagtaattgacgttttaatttaaggagagatgttttttgaaaactaaatctattttaactaagactattgctgttgctgctttatcacttgcaggtattggtgcaatcaatcaactagataataatgaagcacaagctgccgttgtgcaaaatgatgcagcagtgtatacaactacacaagctactaccgtttacaataactatgaaaatccagttgcaactggtcaaactctagctgcaggtactaactggaagattataaaaactgcttatgattcaaagggacagaagtggtatgatcttggcttaaatcaatgggtattggcaactaattatactactagctaaaatactcaagctagacaagaaaatacctacactcaaacacaaacgccagctcaacaaactacacaagctagccaaagtcaaagttcatacacttattcaaatgtgaactacacacctaagacgacaacaactagttcatattcatcaaccgcgacaggttccgaagctagtgcaaaggcatggattgcaagcaaagaatctggtggctcatacagtgctagaaatggccaatatgtaggtaagtatcaactttcttcatcttatttgaatggtgattattcagctgctaaccaagaacgtgtagcggataattatgtcaaatctagatatggctcttggagcgctgctaaaagtttctggcaagcaaatggctggtactaatagataactccaagttctgactaagatagatttgttgaaatttcaccttcaacaaacaaagacgactactcgaaatgatccgtaccgtgtcaagtagacagcttaaatatataaattaatttgattaatcagttcgctattgtgcgagctgatttttcttttcatcaatctttttccaaaagtctttatatcttttatcttgttttattggatatgaaattatattctctggattattcttagcttcttttctaacctgacctgcgctcttgccattgaagcgctcctgaggatcataattaatatagtattcaatacttgctttaaaggctttttccatctcttcatagctatttgccttcggataaagaacttctcgcatttctttaattaaaccttgccagccttccattgggccattatcaatacagcggccaattctagacattgattgtggcatgccatgttcttctagctcatgcttaaaaggcatcctggtaaattgaaatcctcgatcactatgaagcattgcatgactattgggctctcttttccaagcagttgacagagcagcgttaactagggctgtatcattgcgcttgcttaaagcatagccaacagggaaacgatcatatagatcaaagatagtacagagataaatcttttgacttgttccaggaattttttcttcagtaatgtcagtgcaccatttttcattgggtttagtggcattgaagtctctatgcaatagattttcggcagtttcttccggtctagcagcttgatagcgatacctcttattaaatctggccttgctagtatagatgccattcacgcacatcaagcgagccacagttctacggtatattttggcctcaccgtctgctagctcattgtttaaagccaaagtcatcttaggagaaccaaagaggctgttattgctctcagctatttctttaatacgcttaagaatcttttgatctcttagttcacgtttgcttggcttatgattaagccatttgtagtaggctgaccgggcaatattggcttgtttgcacatccattcaattgaccacttatattctcggtgacattctttgatcaaactgtaaagagaatttcgctgctgttgtttaagtgctatttgtctttgttttggctgtccagcaaacacatcctttctaattccttcactttttttaggaaggctatctcttggtctttaatatcattttcttttttaagctgttcaatttcacgctttagcctttgagtttcagatagctcagcttcttttaaacgatgaccgcgcctatctgctaagccgtcagttccctttgcgctgtatttttttgaccagttgtatacttgggcatagctgcagccaaatttaagagctgcttccttgtagttccattgatgatccttgcagtatttcactatctgtttacgttcttctagggttgtcttttttctcttagtcatataagcctccagaataggattgtagtccttgagttcttgatgactattatacttgataacccactgctttaactgtgcagcacttcgcaaaccaaacttatttgttagataatcatatgagccttcgccatttaaataggcagctatgcatttgagtttaaaatctttactgtatctttgattatatttatgtggtcttaatgcttctggcccatgatctttaaatgcatatacccattggcgcagtgtagtcttgccagcccctaaaactttcgcaattgaagcaggtgatgcttcgccacttatgtattgtttaactgctttaagcttagcttcatagctaaatttactttttctagacatacaaaaagtcctgctttcatagatagtacaattttatatatttgtactgtctactaaagtaggactatatcaaaatgggtagtcgtttttgcttgtttatttttttaattcaaatttactggtttctacatagagtgtcatatttttacgatagtaatttaaagttttcattgaaagatgtaatttttcaatataatccgcttctcttaattttgaattagacaaaacagagtagacataagacatccgaagcttatgtgtagttaatggcatgccgactattgaacggtcaggggcaatttttgggttaatattaaaatcagaagcgtaatgtttgccatcgcggcgagcaaacagatagggattatcgttattggcaaaattagtgtgattttggatatattctctgacatcattttctttaacttttaccaacaattcatttacatgcaaaatcataatttcttttggcttaaaaccacaagcaatagcagccatcatcttgatagtttcaggatgaatattttttatttgaattaattctgataaatgattttcccagccaataacatagtgttgcttacgattgaagcgattaccacgtaaagtgagcaatggataagtaatgatgtagccatattcattcaaaaaaacaaaatacatctttatgtgactaagatatttatttactgtattacttttcatatggagtttattttcaagtgaatctaaaaagttacgtatatctccagttgtaacattttctacatttgcttcagtagcatctaaactaccagaataataatcccaaaaagttgaaattgaagaacaggctagagaaatagttgaatcggctagtttcttttgttgtttacagtaaatgcgaaatttatcttcatatggaaaagtcaagattgaggctcctttcaaacattcgttaaaaataattatacattatttcaagcacgttgttactaaatttttttattaaataatcaaactgcgtgtcgctttgcgacacgcacacaatacaacttgccaaccaaacagaaaagtcgtatgatgataactgtcaactgaataggcgatgacgttcgccattaaccgagtaaaatctaatgacgtctactttatccgataggggtaaagtagacgtttttttgtgggaggaatctgtttgaattcaaaatttattaattacattagtatcgctattttcgccttttttggtggtatggcacgtgctggtttaaatgcaaacttcagctattatggtactttttggggtaatgtcataggttgctttttattagcgtttttcacctacttttttattgaaactaaagagattaggcagtggcttgtagttggattaggtactggctttgtaggtgcatttactactttttcaacttttaatcttgatgttttaaaaaatatgcaggctaatttgccaatcgaagcagtaatttattactttagctcaattatttttggctttttttttgctatgttaggaatgaaaattggtaaaaaagttggtcaattagtaagaaaggaaaggaatacacgatgaattttttgcttgcaggaattggtgcatcaattggagctatgcttcgttatgctattactaattatggtaaaaagcattgggaatggattggtaataaattttctaatttacctacaccgactttgtttattaacttaactggagtactaattttaggcttgatttttggaattggtgctaacacttttatttatgcattactaggaactggagtaatgggtggctatacaaccttttccactatgaatacagaattagttgagctttataagagtaaaaattatcgtggtcttgtattctacgcggtgtcatcatatctgggtggcttggttctagtttattgcggctattatttaggaaatttactaaaataatgttgacagcatgaaaaaaatgggtttgcttgaacagattaaaaataggggattagtcctagatggtgcaatgtcgtatgaattggaaaaacaaggcgtagatactaataataaattatggaccgcaacagctttgattgatcagttgagcaaagtttatcaagcacattgggattggttaatttttataaaaatggctggttccccaacggctggggtggagtatttacaacaatgctaacagtaaactttgctttttcaggaactgagcttattggcattacggctggtgaagcagagaatcctcagaaagctattcctgaagcaatcaggacaacactttggcgtttaattatcttctttattggctcaattgtagttatggccgcattaattccttatcatacggctggagtaactcaaagcccatttgtgtatgtgcttgacctaattcatgtgccatttgctgcaaatattatgaacttcgtagttttgactgcaattatttctgcggccaattcaggtttgtatgcttcaactaaaatgctttggtcgttgggcaacgaaggaacaattcctaaagcattcaccaaaactaataagcgtggtattccagtattgtcattagtagtaagtatgttagacggaatttttgctttgatttctagtaaagttgctgcctcgacggtttatctagtattagtttctatttctggattagctgttgtattcgtttggacggcgattgcatggtcagaattgaagtttagaagggcatttttaaactcaggtcatcaactcagtgaattgaagtacaagaccccatggtatcctgtaattccatattttgcatttatatcaagcctgctttcttgtgtattaatctggttcgatccaacccaaagagtagcattgtactatacaattccttttgtagctatttgttacttgggacatcatttttggctaaaatctaagaaaaataatgaagaagttttattggaaaaataaaaaagtcactagtgatatatgacactagcaactttctatagcttatatactgcattaaaacaagatcagtatataagcttttttgatacatgtaaaaatttttattcggcgtccttagtcaattcatagatagcttcggcataaatcgcaattgaattaattaggtcatctaccttcatatattcatttgcttggtgcataaccattggagcatcttcaggttgagcgccatatgcaactccatgcttaaataaacgcccataagtcccaccgccgatcacgacttcatgacctttattaccagtctggcgttcataaactttgagcaaggtttgaactaatggatcgtctccaggtacataatgaggttcttcaaatgaagcaaaacttggaattaagatatcaccaaatttttcttcaacttgattaaccatcttatctggatcagtaccttgaggatagcgaatattatctttcaaaacagcatttccattttcctcgtagtcaaacattgatggagcacttgagagatcacccatcaagtcatcatgatgagcaacgcctaattttttgccgttaaagtcttcatgttcaacatcggctaagaaatgaagccagcttttatcgcgaccagcaaaatcaaattgatctagaaatactgccaaaaatgtagccgcatttctaccaacttgaggtgcagatgcatgggcaccttgaccagttaattcaatcttagcttcatcgccctcaatagtgaattcgccttcaagtttattatctgataaaaacttagtatatttttccttcattgtggctaaatcactaccaacaatagttgcataggccttttgaggagttacgttttcggcaatgccggccttgaatgacttaaggattactgatccctttttattgtcatctttaaaggtcatggtcagggtatagatcccttgttcaccgttgataattggaaattcggcatcaggtgagaatacttgatcaggggttggctcatgttttaggtagtaatcaatgccaacccaattagtttcctcattggttcccacaataaaatcaatctttttcttaggttcaaatccagcttctttaagtaaaagcatgccataatatgcagctagggcaggacctttatcatcggcagaacctcgaccaatgattttaccatccttaattaacattttaaaaggatcagttacccagccgtcaccagctggaaccacgtccatgtggccaataatgcctaaacgtttttcaccagtaccatagtcgacacggccagcgtacttgtcaacatttttgatatggaaaccatcacgctgtgcaaacgataagaatttcttcattgctttaactggacctggaccaacaggatactcttcggaagtattattcaaatcctcagatgagtcgattgcgattaattcgtcaagatcacgaagaatgtcgtcctttttggcttgggccaatttcttatagtctaaattcatattctgcctcttttcttattttttgttagctgaaattttaccagaaaaattaatattaaacaattatacatttaaaatgggaaaataatgagcattaaagttgtttttagttaatcgtgtcatgtacactataagaaataatatagataaaaattacagaaagtatatagaaacggaaagattattatgagacaacatgttcctgaactcgatcgcaatttaagtaacgacgaattcctagatctaatcgttgattgtttccattcagtaatttttggtaccgttgatcaaaatggtgatccacataccaatattatcgatattgactttaatgaagatggtcgtctgatttttgcaacgactaatcagaagtcattttatcgccatattaagggacacaataaagtttcaattaccgctttgcgcggaagagaaactctcactagcattggtttcactctagaaggctatgttgatgaggtaagtccacaatatttagaacgaatttataaaatcaaaccaccaatgcatcatatttatgctaataaaactaaagatatgaacactttacgagcttttgcattaacaccaattattggttctgtttatgatttacggtttgaccatgtttttcaaaaacaattcgactttgttaatgttcctagtaagatgcaggttgaaatcttagaataataaaataaacatgcctcgattttcgaactgatcgaagcatgtttattttatatattcatttctttacgttcttcgcgttttcttaagtatggtagtaagaagcctaagccaaagagtacgataactgtaataatattcataattaattggtgattaaaggctgcgctaccgaatgttgcttctgcttcttgaggaataaatcctaaagtagcacagataaaggtaaagattaagcaccaccagcccatgataagggcaccagtcttatttttaatgaagacataatctgagtggaacttctcttggtgcatccgtaacataatgaaagcgaagaatacccaacaagtcttgtatggggaaataataccattgatatttaaaagccaattgtaaattgaattaatatttggcaaagtcccagtaagtaaaagcaagaataaggctaaaccacaagttaaagtgtacgagtgaactggacgacctgttttgtcttttttcccagttaaccattttggcatgaatttgtcggcaacgtcaccggcaaagacacgacttgatgcatcaagtaaaactgctaattgggccatcataaagagggcttgaacaacagcaaagatgtacattaatactttgccccaaccaaggctttcgcctagtagttgaaatgcatagtaaggtccgttcatcttgaaatcatgtggaatatgatgagcattgaaaaacattgctaaagccaaagtaccgaagatagtcaagaatccagtcatcaaagccaacatccacattgctttaggaaattcgtgttttggatcgcgcatttgtacgatataaggagcagcaagttctgcaccagacatggcgaagattagaagaccagtggtagaaaagtaacgtaaactaaatgatggcttaaatgcggccaagttaaatggttgggtagcaatatggtgtccatgcataactgaccaaacagcaagtaaaacaaagagcatagacataataaacattgcaccaccaccaattaaagatagtagttcaagtgaattcttgattgcattttcaaccaaaataaaggcaagaataatgacaaaggtcaaaatcccaaaccaaaaagtagacatatgcttgtctaaagtattgttgcccaaaataatccatgaaaaggacacaataactgaattagaaacatcgaccaaataaggaacagtttgaacccaatacatccatgaagtccagtagcccagtgtatcgttagatgaatgacgtacccaagatgccaatccaccggcttgatcagtaaaggttaggcccatttgactagacatcaatgcataaggaataacgtaggcgaagagtaggaaaatccaagatacaactactgataagccttgattttgaaatggataaaaaatattttcaaaactgataatcgttacgaagtcgatcaatgcaataaccggccatgacatgtagtgttttttgccgggttcgaaattgactgtttcgattgtttctgacataaaaattcctccaagttaagctattttattgttgtgttgacatagctgttctcggaggcgagcaaggcaaatgcacttgttaaaaacctccaatatttatataataatttcagctgtagcgtattttaagaaagaatgcaaaaagtacgctatactgtagaaaaattataaagactttttaaagttttgcaatatgtaaaacggtttcgtggacaaaatggaaagaaaaaggatggattttttgaaaattgccattggaaatggcgtcaatgttaataagatgaaaggttggtcgtcaattccaattggcgatgtacaaaatagtgctgaacttgccgcaattgttgtcaaaaatgatgatgcattaggaataaaacaagcagaagctctaagagaacaatctggctttccgattccattgattaaagtaactgatcaggtagatgaagaccaagtcactcagaaagctacagaatatgaaaagcaaatggtgccaggctttttgaccgacttgatcaattttgctcaagcaaaaccaatttcatttactacaccgggtcaccataatgggcaatattatgacaaacatcctgccggagtagtttttaataagttctttggtaaaaatctaatgtttgccgatacaagtgatactgttcctcaattaggggatacaatgacgcatgctggaacgccacttaatgcagaaaagaaagctgctaaaacttatcatgcagataaggtttacttctgtaccaacggaacgacttcagctaattctatttgcgcaagtgcacttttatctgaaggcgatctagttttatttgatcgaaataatcataaatctttgtataattctgccttggtaatgagcggagcaaagccggtctacattccaactgatcgaaatgcacttggactaattggagaaatggatccagccttcttaactgaagataaaattagagctgaagtagctaagatagatccggcaaaggcaaaggctaagcggccatttaggttagcaatcgtacaagcagaaacctatgatggagtcttttatgatgcacaatggattattgaccgaatcggtaaactttgtgattatgttctgtttgactgtgcctggggcggctttgaagaattcgtaccaattatgagacatttatcaccacttctacttaacttgggtcctgatgatccaggtattttggttactcagtcattacataaacagcaagcaggtatggctcaagcgtcacagattctaaaaaaggatgctcatattaaaggacaaaaacgatatgttgatcataagcactttaatcatgcttatctgaagtttgttacttccagttatgcatacccactttatgcttcattaacagttaattcctacgttactgctggagcaggaaataaaaagtggtgggatcaaactctgcgaatgggaattgaatggcggaaaaaactactcaaaaagtctaagctatttaagccattagttcctgacaattttgccgaaatttcgactgatgaattggctaccaatgcagaatattgggaaatgggacaaaatacggattggcacggtttccgtaaaatggttccaggcgaagcaatgattgacccattgaagattacggtaaaaactcccgggattgatgtaaaaaatgaaaagtatgagaaaacgggtattccaggcgcggtagtggcagaatacttaatggaaaatcatattattcgagctaaaaatgatttgaattcattgttgtttttacttacaccgggagatagtcaagcagaactagatactttacttgaagcttttttaagttttgaaaaacactatctagaagatgacttaatgaaagatgttttgccggttttatataatgagtatccaaagcgttatcaaggctataccctgaaacagttgtgtcaagagatgcatgagtactatcaggaaaataatacttttgtattacagcaaaagctattttctaaatcagggatgcaagactatcaaatgacaccagctacagctgatcagctttttaaaaaggatcaaaatgaactggtcaacctagaaaatgttgttggaagaattgctgccgaaggagctttgccgtatccaccaggagttttcattgttgcacctggtgaaaaatggggagtagtagaccaaaagtactttgaagtcttggcgcatgctattgaaaagtttcctggttttgtgccagagattcagggagtatatctgagcgaaaataataatggtagtttatgcgtacaagcagaagtaatcaaaaataaatagggagttaaaaatgagtttttcttggaaagagaatttaccaaaagagttaagcgataaagtgactaaagttgaatcaatgattcaacctcgtctagaagaaattgatgaacaagttttgtataatcaacaacgtgtattggacctatttagaaaacatcatgttggtgaagaagatctagttccatcaacaggctacggctacgacgatataggtcgtgataagattgaagatatatatgctgactattttaaaacagatgatgctctagttcgtccacaatttggttcaggtactcatgcaattactgttggtttatttagtatgcttcgtcctggtgacacgctttattatttgacgggtacgccatatgatactattcaagaagttattggcttagctggcaataaaccaggcaacatgaaggaatggggcatcaagtttaagactacagaattaaaagacggcgaggttgattatgatcaagctaaaaaagatatcatggatccttcaattaaagtagtggcaattcaaagatcattaggctatgcaactcgtaagacttttactatggctaagattaagccaatgcttaagttcattaaagaagttcgtccagatgttaatatttttattgataattgttatggagaattctctgaatgtgaagaaccaactttttatggtgctgatatgatggctggttccctttataagaatgctggtgcaggtctagtaaaagggggagctttcttagttgggcgacaagacttaattgatggtgctggttcacggttgacagtgccaggagctggaaaaggtgaaggcgcaacttggggttatttgcgcgatatctaccaaggattctttatggcagctcatactactggtgaagctcaaaaaggtatggtctttactgcagccttattagaagaaatggggatgcaggtttcacctaaatggagtgatccacgtagtgatattgttcaaactgttacttttggtgagccggatccgatggtaaaattctgtgcggctattcaacattattcacctatgaactcttttgttgacccaattccatatcatcaggatggttacgaagatgaagttgttatggcttcgggaagttttgttgaaggatcaacaattgagctttcttctgatggccctttacgtgaaccatacatgctttatattcaaggcggtttgtcctatgctcatgataagattgcgattactcatgcagtagaagaaacattttataagtaaatttaactctaaaagattcacatttttctttatttaaaagtgtgaatctttttatcttgtttggggtaaattgttaatttagaataaaaagtagcaatttaactagttaggataagtttatgaatccagaagaagttttaaaagatatatttggctatacaaattttcgcccaggtcaaaaacaagtaattgatttagttttaaaaaagcaaaatgtgttagcggttatgccaaccggtggcggaaaatcaatgtgttatcaaataccagctttgattaattccggtgtaactttggttatttcaccattaatttctttaatgaaagatcaaattgataatttaaagcaaaatggaattaatgcggcagcattaaattctactacaccgcaagaagaggttaatccaattttacgtcaggcatataaaggcaaaattaagttaatttatattacacctgagcgtttagcgattgattattttagatatcagttaaattttttagatattgatctagttgctgtcgatgaagcacactgtatttcacaatggggacatgattttcgacctgcttatcgtcaattattagatggaatcaattcactaaaaagcagaccaaatatattagctttaacagcgacagccacgcctgcggttcaagatgatatttgtgaacaattgaatattcccaaggagaatatgattgttacctcttttgctcgccctaatatatcgtttaaagtggtcaactcaccacaaaatactccattatatatttcagaatatattaaggcacatcaggataaagcagggattatttacactaatacacgtaaaaaagttgaaagtttgacagattatttggctaagaaaggaatctctgttggtgcttatcatggtggaatggattcttcagaacgaagtcaagtacaggaagcttttcaatttgatgaatttcaagtaattgttgcaactaatgcttttggaatggggatcgataaaagtaatgtcagatttgtgattcatgcctcaagtgcccgtaatatggaaagttactatcaagaagcaggtcgggcaggccgtgatggggaagaaagcgaagcgattttaatctatcatcctggtgacttgcgtcaatatcgctactttattgatgaatcagatgcggatgataaatatcgagaactgcaatatcgtaagttgcaaacaattactgattatgctaatactggtgaatgtttgcagcaatttatcgtccgttattttggtcaagattgtccgccatgtggcaaatgctcaaattgtctaaatcaggataaattgactgacattaccattgatgctcaaaaagtgattagtatggtttatgaactagatggtcgctttggaaaaacgatagttgctcaatgtttgattggctcaaaaaatcagcgcatgcaagaaatgaatgctacacaatataagtcttttggctctctaagaatgaagcaaaaagatgctataagcttgattgactatttaattgcttcaggttatctagaagttgaaggtagcaaatatccactagtgcatgtaactaatcatgggtgggatgtactagatggcaaaactgtagtcaaacggcgaattgctaagatttcagtaactactactcatgctggtgaagaaagtgatactttatttgaagctttaagacaaaagcgtttggaattagctaagcagcaaaaagtaccagcatttatgattttttcagatcgctctttgcacgatatggcacaaattaaaccacaaaatgaaagtgaatttttagaggtaagtggtgtagggcaagcgaagatgaaaaagtatggtcaggctatgatggaaataatcaaaagaaaaggaaaatagctaaaataataatattaaaatattggtcaaaccggtctttttttattacaataaatgtaaatgaaagaaggactatatttatggctaaaaaaacattaattatctattattcttgggaaggcaataccaagaacatggctgaaaagattaacggcgaaattgaaaacagcgaattaaaggaagtaactgttgctcctgacgcttttgattcagatatgtacaagaccaacgatattgctctagatcaaattcaaggtaagattccttatcctgaaattcaaatggatgatatcgattttaataattatgatttgattttagtcggtagccctgtttggtcaagctatcctgcaactccaattaagccattacttgaaaagatgaaaaactaccgtggtgaagttgcatcattctttacctcagcaggcactaaccataaggcttatgtcagtcactttaaagaatgggctaaaggtctgaatgttgttggtgttgcacgtgatgatagtgaagtccgcgattgggttaaataattaacctttagaatattaaaaatcagtacaaactccgtgttttgtactgattttcttttgtattttaagaacaaaaataagagttacaaaatgtaaccctcatttttatttaggacacgaatcaagcgccgttacgcatgactcctagcttgataggtgtttctaaatatgtggtatttttatatctatcaaaagaaaaaacaacggtttctttaatcaatatcacaacaacacctcatttctatgtcttttaaaagtaagcgcttactttatctacttataatatatcatataacacatatttttaatagtaattttgtcataattttccaaaaattggtttgcttgttggtaattcatgattatagattaaaatagataatgactaaataatggaaagggaatatttaatgacgattccaacgaaaattgaagttcatggcggacgagtacataacttaaagaatattgacgttgacattcctttgaataaatttgtagcaatttcaggactgtcaggctcaggaaaatcatcactagcaatggggattctttatgaagaaggttcaagacgctatcttgatgctctgtcaacttatatgcgtaggcgaattaaacagggaaatcaggttgatgtaactagcgtcaaacatattccctccgcattagctttacggcagcgtccaagtgtaccaaatgagcgagctacagtaggaaccatgagtgagacttttaatgttttacgcttaattttctctcgtttgggttctccagtttgtcctaatggacaccgcttgaagccgagtttggcaattgcaaaggcaatgagtatgtcaggtgagcaaatgggacaattaacttgtccagtctgtggtgtaaaattttatgcaccaagtgccgaacaatttgcttttaattcagatggtgcatgtactgagtgtggtggaactggtaaggtacggcaactagatgaatctaaactgattacggatgaaaatttgtcaattaaagatggtgcagttgcatcttggagcttgccaggacggaactttatgcctaacgttgcagagcatgctggtgttaggatcgacattccttataaagatcttactgataaagaaaaagattttgtcttaaatggtcctgaaaagaaatataaaatggactttttatcaggaactggcagggtatttcatgattttaatgccttatatgaaaatgctcggcaagccgtttaccgctcagcaaagagcagcaaatcagaacgtgcgcaaaaaagaatagccgaattctttacttattcgacttgtccactttgtcatggtagtcgtttgaaaccagaattgttacaacagctgatcggtaagcaaaatattaatcaggtggccgaaatgcagttaggtgatttagttacctgggttaaagatgtgcaagcaactttaccaactaatatgcataaaatggctcattcgattattcaggagtttttggataatttgcaaccattattagacttagggctagactatttgactatggctagaagtggaaataccttatcgacaggtgaattgcaacgaattcaattagcaagaacattacgtactgaaactactggagttttatatgtcttggatgagccttctattggtctccatcctgctaatgttgcaggattaattaaggttttacgaaaattagttgctcagggcaattcattagtagttgttgatcataatgttgacattattaaagcagctgatgaggtaattgagattggaccaggttcaggtaaaaaaggtggtcagattttggatcaaggttcaattactgcaatcaaacatgatcagcattctttaattcgaccatatttggatggcagtgctaagctacttgccagagagccagccaatcaaataaattccgattctatttcatttgaagtaaagcaatattttaatttacatgatgtaaaaactaaaatcccactaaaccaattaactgcagtaactggtttttcaggtgccggtaaaactagtttgattttggatagtttagtgcccgctattatagcaaaaagcaaaagtgaaaaattgccaaaacaaattagtagcttttctagcccaatttcaaatgtagtaagtgttgatgcatctccaattggtaaaagtactcggtcaactgtagcaacttatacttcaattatggacaatttacgaaagttatatgctagtcagccactcgctaaaaagaagcattatacgccaagttggttttcatataataataaacaaggagcttgtcctacttgtggtggtacaggaattgtgactcttgatatccaatttttaccagatatgcaacaagtctgtccaacctgtcatggtgatcgttataatcaagatgtacaaaaggtgaagtggcatgatctgtcaattgttgatgtcctaaatctagatgttaatgaagctctaccgatttttgttaaagtgcctaagattgaacgagagctaaaattgttaaaagaagtaggcttggattacttacatttgggagaagatacaccaactttgtcaggtggagaagctcagcgccttaaacttgttactcatcttagtcataaacaaaatgatacattgtttgttttcgatgaacctacgattggcttgcatcctcttgacgtgaaggttctggtccaagtaatgcaaaagttgttagatcagggagctaccattattacaatcactcatgatttaaatttaattgtcaattgtgattacatgattgatttaggcccacgtggtggtaaaaacggtggtcggattgtccaagagggtaagcctttagaattaaagcaaaagcctgaaagtttaacggcacactatttggccaattatttacatgatttcgaaaatctattttaatattatatgaaaatagcattaaataaatttatagcaaactgtagctaaaaaataagacataggaagaaataatatttgaaacagatctaagattaatgtaatattaaatataaattaactgtatattaactatctactcaatttatactaaggtgagaaaaatgaatttgctcaaacagatccgtgatcgaggattaatcttagatggtgcaatgtctacagctcttgaaaagttaggcattgatacaaataatgaactttggacagcaattgcattagaacataatcttgctcaaatttatcaagtacatatgaattattttaaggctggagcccagatggcaattactgatacttatcaagcaaatatcccagcttttgaaaaacatggttttacacaagaccaggctactaaattgattactaatgcagttcaaattgccaaaaaagcccgtgatgattttgcaaagacaacgggaattcataattatgtagcggcttcagtaggaccttatggtgcatatttagctcaaggggatgaatttcgcggagattattctctaacaacggaggaatatcttaattttcatttaccacgattgaagattttattggcaaataaacctgattgtctcgcacttgaaactcagcctaaattggatgaagttgtagcaatcttagattggttaaaggaaaatgctccggaaattccagtgtatgtaagttttacattgcatgatacaactaaaattagtgatggcactcctttaaagcgggtagtgcaaaagcttaatgaatatgatcaagtatttgcgattggagccaattgctttaaaccatttttagcaactgcagtaattgataaaattcatgattttactgataaacaaattgtcatttatcctaacttgggtggcgtttataacgaatttgagcgcaattggattccatttaatgcaaaattcgattttaaaaagttaagtcaagagtggtatgaacatggtgctagaataataggtggctgttgttcgactaccgaaaaagaaattggccaaatttccgccttttttaagacaattaacaatactaaaagcaaatcagttaaatcagagctaaaaaaggttaaaaatgatagcaatatacaaatttgatttttaaaaattcatatactttttttgaaatttatcaagtaaaaatctttatctttttatttttatttgatattatagtagcggagcgtgtgatgagcgctccgaggatgaaaaggctaagcaagatgtttcttatgacatctgctgataggaagaaatttgaaggtgtagaaaagccattaaggacattttccttagtgactttttctttttgcccaaaataaatagccgacttatcgtcgactatttttaatcttaaaaattatttttgtctgtttgtggagtaactttatcccaaattgcatctactaagccaatccacattaagcctatagcaactgagccgcaaacatcacttggccagtgagcgtagagataaactcttgaaatcattactaaaacaagccaaatagctaataaaacagtgagccagattttagcagttttatttttaactaaagctggaatcaatattagtattagccagaaaacaatgatcgccattcctaatgtgtggccactaggaaaactgaagccatcatcagcagctaagtgagcagttggtcgtgcccgttggattatatgtttaacaatccaaccaaaagcatcagctgtaactagtgaaatgacaatacttgccgaaagaggacgctgctttttcagccaaagaatgacagctatcaacagcatccaaactaagtcaactttagtatctgctaaaaatgtaattacatgcataatgctctgcagattaggaatactgtggactaagccttcaaagaaattgtcaaagccggtaacccaacttgcatgagccataatagagaatgcaagaatcaaaaagatcggtaatccgatacaaatagaataaatattttttttgcgcattttttcctcgtttatacttatttttataacaataatgagtttatcatagaatatgagtagaaagagaaaaattttaaattaattggaaaataatcatggaaattaaagagataaaatctaataagaagcagtatatagacttacttttgttagctgatgaacaagagagtatgattgatcgctatttagaacgtggaattatgtatatcttgattgataaaggaaaagttagatctgaatgtgttattacggttgaaaatggtaatacagtagaaataaaaaatatagccacttatccagaagatcaaggtaaagggtatgctaaacatttgattaattttattgctaagaagtatcaaaataaatatcaaattttgcaagttggaacgggtgatagagactgtaaaatagtttgtgtaaggatgaatgattccttaaatttatttctttaaacattagaaaaaggagttcctttctcgtatgattggtttgaacaaaaaaacacatacagaaagaagaactccttcatgaatgattttaccaaagattttgctcaagctctattcaatccagacaaaataaatgatttattgcgcaaagagctacaacaggctgttaataacttgttagaagctgaattgaccgcctttctgggctatgatccctatgccagaaatggctggaatactggcaactctagaaatggtgcttatttccgcaaagttgatacgcaatttggcccaattgaagtgcaagtgccccgggatcgcaacggtcaatttcatcagcacacgctgcctgactacaagcagcactcggatatcttggaaagcatgattatcaagctttactccaagggcgtgaccaccagggaaatagccgatctaattgaaaagatgtatggcagccattacagtccagctcaggtatcaaatatttccaagcagatgattccaaaggttgaggcttaccacaaacgcaagctaagcgacaagtttttctgcgtctatttggatgcgacataccttcctttgcgccgagaaacatttgagcgtgaagcagtctatattgccattggcatcaagcctaatgggcacaaggaggtcattgactactgcattgcacctagcgagaacattgaagtctggacagatatgcttcaaaacatgaaatcccgaggcttaaagcaagttgagctttttctttctgatggtgttgttggcatgaaaacagccttggccaggacttatcctaaagctcattttcaacgctgtttggttcatgtcatgcgcaatatctgcgctaaagtacgcgtcgacgatcgtgaaaagatcatgaacgaattcaagcagatacatcaacagacaagcaaaaaagaagctgcagctgtcttgcacaaattctatgccagatggaataaaacttatagcaatgtcatcaaaggtttgaaggaaattgagcccgatctgctggtcttctacaattatcccaaacaaatcagagcttcaatttattcaaccaatatgattgaatcctttaacaacgtcatcaagcgtaaagctaagcctaaggcagaatttccaactgaacagtcgcttgatgcatttattggcatccaggcaatgagctacaatgaccgctatttcaaccgaattcataaaggctttggtcaggttcaggataccttagaatcctactttgattaaataaataattaaaaaatcaatttacgagaaagaactatttacacaaaagatttgacagtttcgggtgatagccccttaactattcctttttatgaaaaatgtggttttaaacgctcaggtaagatcaaagatttttttgtaaaaaattatgatcatccgatttttgaagctggacatcagctactagacatgatttatttaagtaagcgattaaattagaaagtaggctttatcgatggaagaaaatactaaaaaaatgttggcaggcaaaccatatcgcccagatactgaagaactgaaaaagatttccagtttagctcatcgcttatcacgtgattacaacatgactactgatgaagatgaggtagaacggaaagcaattatcgatcgtctttttccgaatcatggtcaaaatgtatatttacaaggaccaattgaagtggattatggccaatttacacacttaggagataatttttattctaatttcaatttgactattttggatacttgtcccgtaacaattggaaataatgtaatgtgtggacctaacgtaacatttgcgactccattgcatcctttgttgccaactcaaagaaatgctcgcaagcaatcagacggaaaaatagccgatattgaatatggagcagctatcactgttggcgataattgttggttagccagcaatgttactgtttgtcccggcgtaaaaattggtaaaaattgcgttattggagctggatcggtagttactaaagatattccagataattcattggcactaggggtaccggctaaagtaatacgtcagattactgatcaagatcatttaaataattatccatattagaaaaagaaaatgtatacgttctcattgattctttatcaaaattgtaaccccaatgaaaaaaataaatgctagtattatgggtagaatttacataacattgctgggggaatttaaaacgaaacgtattaattttaaaaaaacattaatcaaatcaaccatttcgttaactatagctgcttcaatgcctgttggaatggcaattgctaatgccaatagctcgacagttcaggcagcaagttataacaaaactgaaatgcggagctttgttagaaatacattagctagttattatgctcgtggtaccgtagttatagtaaaagatggacaaccacaacaaatttcttatggttacggttattatggcaagcgattaggtgcgggaaatagtaaggtagtttatcctgtttgttctttgcaaaaagtaattaccggcgcaattatcacccaattaatttctgcagggaagtttacacagtatactaagatctctaagtggtatcctaatttaaaaggtgctgataatattaccgtcggcaacttgatgacgcatacttctggattgacagcagctgatactgaagtaaatagaggacgtgtttattcagaagctgatgcaattaattgggttgttaataagctaaactcaactacgcaaaatcaacctggtaatttttcatacaataataccaactatattttgttagctggaattatacgtcaagaaactggacaaagctacaagcaaaatgtgcaggaacgaattattaataagcttggcttaaagcgaacttatttcttggaagatattccagccgggatgacggatggtatctcatatacctggaatcaaaagaattaccaatgggctcaatatgttaaaaagactcaagcttctcaattggtaggtgctggtaatttgttctcagctccaatggactattaccgtattcaacttggtttaaccaatgggcaaattttgagtcgaacagactttgattatatgactcatttaacatcacgttcatcaaatggttattcaggtggtttatatatgaagaataatgataacttgaagttagcatatggtaacttatataacactcactttggtaactggattcagatgactacagataatcaaaatggtttgattatgttcttaaatcaaactcaaaatgatgaaaacagaaataaacaaattggttatcaaattttgaatcatatcaaggctaatacatttagcgcaaaataaaatttttcctgctttaaacttcatgttaagcttaaagcaggatttttttgattggagtaaaaaagatggttaatggtggcgtattagttagccaagatttatcttgtgctggtcaagtatcacttagtgcagctttacctgttttaggagcatgtggcttgagcccgaccgtattgcctactgcaattttgtctacacacacgggtggctttggtgagaatacttttttaagtttgaataatgaaatggctaagattatggcccattggcaaaaggttggttttgatttttcagctgtatacttaggctatttgggcaaaagtgcattagatttttggacagaaaagattagctattttaaacaaaaaaataaattgatcttgattgatccagtaatgggtgatcacggtgaactttatcgtggcattgatgaaaactatgtaataaagatgcgaaatctagttaagtcggctacgattttaacgccgaatatgacggaggcagcatttttattaggcaaaaaggcaactagtaattcattgaaaacagcaacagaatttgcggctgaattatctagtcaatttggtgtcccgaatgtcataattaccggtatttcacttaataaggaaaaaattgcggaagttggaattacagccgatcatagttggtctttaattcagaaaaaactcccaggtaattattttggtacgggagatttgtttgcaagtgcattttttgctgctgtaatgcataaagaaaatttagaaaaagcgtgttcaattgcggccgattttgttgcacaagcaatcagggaaacacccaagcaagattcacgtctaggaccaaattatgcagcagctttatcagatttactgaagagatggagtaataattaataatgcagatatttagagaaaacaagaattctttacaagctttagttttaacgggactttttgcggcaattatttatattgggatctgggtgttaagaatccccgttcctgctatggtaggacgcccatttattcattttggaaatacgctaactgctgtagcaattttatatttaggttatcgtaatggcatgattgcgggaattattggtctaggtggttttgatttgttaaatggctatgccgcaacatcatggttaactatgcttgaggtagtagtagtggcttcggttttgacagcagtttatcgaggaatgcactatcaagatagtaaaagaaatattattattttaggtattattgcaggggtaactaagatattcactacttattgcgtttcgattgttgaagctttaatggtggggacgagctttaaagtagcgttagttggagcctttgttagtttgcctgcaactgtaatcaattcaatttctactgcaatttgtacaccaattttatattttgctttgcgggatgctagtcgtctaattataaaaaaggttagataaatcaatagattttacacgaaatttgcaaggtgctatattaaagatattattactggcataaaaggtaggatagtatgaacgaagacctaaagaaaaagaataaacgaaacaatattattattttaacgattgcagttttaattatcgttggagtaatcgcgggttttggcattcataatcaccgtgtggcaacacaagctgcagcagaaaaatatgctaaaactcactttaaccctaatgttacaatcgatggagttaaagtaggaaagctaaccgttactaaggcaatggctaaagttaaccaaaaagctaaaaatcaagttgagttaaaaaataacgaactggtttatagctataacactacagtccaatcattagatgagcccgagacaaaggccttttttaagaagcaacaaactaaaattccatcgactcagacttataagtttactactagtaatttagctacagctaaaaagaaactaactgacttaagcaaagcagagattacttataaaattaatggcaaaaactatcaattaaaggccaaagatttattgaataatgtgacttatcgagataatcgctatcaatttggtgatactagtaaattaacgactaagttaaatcaaattgataaagaagtttcaacattacacaagagctataaatttacagtgccaaagggcaataaagttaaaggcaaaaccataacggtaaagaataagacttggggttggggcgtttatgttaaaaagacgcaacgcttacttctcgaagcatttgccaaaggccaaaaaaattttgatggtgcagatgcactttacggtttaggctacagcacttatcctcacggctatggttattcaaataaagagattggtgatacttatgctgttgtatcattgaaaaagcaagaagtatggttgatcaaaaagggtaaactagccgttcatcttcgtgatgttgttaccggtactatggaaggttctaagggtgatcaaactccgcgtggggtgtggtatatccactataaggaatcaccaagtacattgcgtgggaccaatgatgatggttcaagttatgcttctccagttaagtattggatgccatttaccttaagtggctgtggttttcacgatgcctcttggcggactgattggagcaagaccgcttacctaaagggtggctcacatggttgtgttaatgttaaaccaagtgagattcgaagcgtttggaacaatattaaaaagggcgaacctgtaattatttacgaataacatgtttaagggatccattaagttggatccttttttatgaaacaatttttataaagtgaaaagctatttgattacttggaaaaacagctaaatgtaaacaataaacgtgaaacatggctctgaagcccgatattatcgcgattgtggataaaaatataggtaattcacatctattactaactcaattaatatttttttgaaaaagagtagaaagatgaacctttgtttgatataatttctatgcgaactaatggtctaaaaatagaaagatgagatgataatagctatgatgcaacaagagaaattagaatcacaggaagaaaaagttgagttttttgatgaagactggttgaattggaactaaaatctttaaatgtataattcacttctgtataattaaagaaaaataaaaatttattaactctttcacctaaaggagtaaattatgcaagtaagaactagatgttttcaaagtttagattacgaagatttgtgccgggttcatgatgcggctcgtttgcaagaaatgaaaataggcggagtggagaaatattttattccgtttaaggaagcaccatactggtataatttctttgattctgagattaggattgtagaagttaataatgaatttgctggctttgctgcgtataagccacataatttagcttatttttatattgatcctcaatttcaacgacgtggtattggtgatcaattgctagcttcagtgttaccaaatattagacggccgattaggctagaagtctttagcgcaaatatagcagctaaagcgctgtatgcaaagcatggttttaaaattatcaaaacagttaaagagtcgtggtggtcagatcccaagtctgagccagtttcaagtgatacgatggaattaatgtaagaggcaatattatatgagtttttataatttagattatgaagaaaaacggtttattcagttagctaaaaagaatactcgctcatattatgaacatcatgatcagattccttcctcacctggccaagttgagctggccaaggaactagtaaaggaaatgaaagagcttgggcttgatgcttactataatgaaaaaacagcttttgcaattggaaagttaagtgcaaacacagcagaaaaggtaacgcctattggcttctttgctcacgtggatactgcagactttaacgcagttaatattaagccacaaattcacgaaaattatgatggtcagaaaattatcctagatgagaaagataatattgttcttgatccaactgagtttccagacttattaaatctaaaaggacaaaccttaattacttctgatggtcatactttgctaggagttgatgataaggctggaatcactggggcattagcaatgcttaaatatttaactgaacatcctgaaattgaacacggtgatgtttttgttgcttttggtccagacgaagaaattggctgtggtggtcaatattttgatccagctgattttcctaatgtagaattcgcttatacgttagacaatgggcggccaggagattttgaatacgatacctttaatgcgtcagaggttacgatccatattaaagggactgtagttcaccccggtgaagcatatggtctgatggttaacgcaacaactttgatgaatgattttttgtctaatttacctcaggatcaagtgcctgaaaagtcacgtaatcatgatggttatttcttggttctacatgctcaaagcaatgttgatcatgccgatattagcatgattattcgtgattttgatcaaagtgaatataaccgtaaagaacagtttattcgcgatatagttaaaaagatgaacaaaaagtatggcaatagatttactgtaaatattcgtgagcaatatgaaaatatctacaactatattaaggacaagccatatattgtaaatctggctcttgatgcttatcgcaagtctggactaaagccaaatgtacaatcctttagaggtggaactgatggaaactttatttcgcctaaaggaattcctacacctaacttatttaatggtggtggcaattatcatggccgatatgaatatgtgactgttgagcagattgataaattagccgaagtgttgactaatattgtgactgaacatttgcgtcaaactcgcactggtaggaatgaaaagccactagaaaaatattggtagatttaatagccgttttatttaacaaattaatactgtagcattaggatataagtggctagatgaaatatccttcctccttagaagtgataaataccattttcttcattgataatcttgctacatattgcagtgacgctgtatttgcgccgctgcttttttgttattattggtaataaaatacgtaaaaagtacgtaaagttttttcgattagcatttaacaaataacttaaatagaactaccatataggtggctggacgagaatcttctctcgtagaagcaattaataaaccaattttcttcatttataatctaaccaaaaaggacagggatgctcaattgcattgctgtcctttatttttgataatcttcgccgtaaatataacgatgtaattttaggtattgctcatataatctgcgttcattttgattgtcttttgggaaataatattgtttgcctttgagtcccttgggcatataattttgcttggcgatttgatgcggagcttgaaaaggtgactcagctaggccagctcccgtgatttctttagcgtgtttataatgaaagtcacgcaaactattaggcatgggataccgattgggatgatcactatcttgatcaagtctttcccaaatttcctcaaatgctcctgattttggcgaaatacacattaacattgttgcaaacattagtggatatttagctttaggcattcctatcttttcagcttgattagctgcagtaacaatttgagttacttgttgcggattagctaagccaatataagtatatggaatctcacgcagacgccgtacaaccgaagctaaatctccattttttagcaaaatagcaagataataaagtgcagcatctgtgtcagagccagccatagagtcagaatatgcagctaaataatcgtaatgtttagtggcattcttatcatagctaaagaattgctgcttagtaaacgatttaacatttgctaaggtgatctttttaggattaagtgcatgaacagtctctaaaatgtttaaagcaattcgtaggtcgccatcagctgcagctgctatcaaatttaacgaatttttttcaacttggtgatctactaatttaaggaccttagtacatgccttgttcaaaacagctgcaatatcgtcttctgttagaggattgaactcaaagatttgacaacgtgaccgcactgcaggcacaatcgacataattggattttcagtggtagagccaacaagtagaacgtgaccattttctaaataaggtaataaaaaatcttgtagatttttggtcatacggtggatttcatcaattaaaagaacgaaggtctgatacttataagcattaataatgttgttcaactgtgctttattatcaattgaagcattaaaggaagcaaagggataatcattctctttagcaataatttgagctaagcttgtctttccggtaccaggaggcccccagagaagtaaagaaatattaacatgctgcttgataatatttcttaaagcctttcctggtcccagcaactcactttggcctaccatatccgccagtgtttgcggcctcatttgttcggcaattggtgttttaaaattcatcaaattccttctttcagtaaggtaagtatactattttctacaatttttttgtaaaaatagcttgcactatcaaaaagtaagttatacaatagaactaatgtacgagaagttaacgagttttttagaaagaggcgtattgtatgattactctttatatgtcaacaagtagtgcatcttcacgtaaggcgagagcatggcttaacaaatatcatctttctttcaaggaaaagaacgtctttaaggaattatctaaagaagatgtccttcatctgttgtctttaactgaaaatggaactgaggatattttatctactcgttcacagtctttcaaacaattaaagaataagttgaatgaagacttgtcattgtctaaaatggttgatttaattactcagaatccaggattattaaagagacctattattgcagacgaccatcggatgcaggtgggctataatgaagaagatattcgtcagttcttgcctcgtgatatcagaaaagctgaattaattgaggcacaacggattgctgatgctgcttaaataagacaaaaaacgatgaatttacctttgtgggtgattcatcgttttattttgctctaaatttttatttagctgaacctgggcgttgcttcttggctacttttttacccatagtcatgttgtcattatatccccatacccaaactgcaataaatgaaactataattgaaacagcactggcaattaggaaagtatagaaactatttagttgagtaggatgggccgggttgaaaaagcttgagaagccaattagaccaccggtaaagccatacatagtaccatgcattaaaccagtaactaggccaccgaaggctgagccaatacaacctgaagcaaagaccttcttatatcttaagttaataccataaatagcgggttcagtaacaccgcagaaggctgaaatagctgctgcaattcctagctcttttatgtctgctttctttgatttgattgcgactgcaagaacagctgcaccttgggaaaccattgttgcgcagataattgcgtttaatgagctttgaccagttgaggcaatttgttgagcaactagtggcacaacgccccagtgaagaccaaaaataaccaataactgataaaaggcaccgattattaagccgccaacccagccagatgcagatactagccagttaataaagactgcgataccatttgcggctccttgaatgattggaccggtaataactaatgtgatagttgaaactacaaggatagtaattaatggggtaaagatcatttgcaagtaactaggcaaagctttctttaaccactgttcacattctttagctagccaagcagctaaaatcattggaaagatagagtaagaatagtttaagaattggaagttccaagatccaagactaaacattgtcgtcatactcttgccccaagtaatcatttgtggataaactaagaaaccgccaattactgcagcaatcattggatcggatcctaaccgcttagcggctgcaaatcctactagaactggtagaaagaagaaagcagagtcggccatagcactaactgtgacatagaccggactcttgacgctaagtaaagcaccaagttgtggaagggtgagtagtgcaagtaagcctttgatgatacccgatgctgcaataacaccgattacaggactcattgagccggtaataaaaccaattagattactaaaggctctagaaacaggatttttaccatcatcctgattattagtttaaggtgaaggattgtcactaagaccaggcaattgtttcataactgcatcgtaaacattggtaacctcattaccgattacgacttgatattgaccaccagcatgcataacgtcaagtatgccacgttgattttttaaaatatcatcattggctttagactcatctttcaaataaaagcgcaaacgtgtgatacagtgaatcaggttatttatattatctttaccaccaacattcttaataatgaaagtagctaattcatcatacgaaagtttcttgtctgaactatcttcttttgactcctttaaataagctcgagcaactgtatcgccagcttctgctttaccttcagttacatctaagccatcaagtttcatagatgaattggtgattaaagtcataatcgtagtatcaagatcttttgctttaatcatctctatattcatcgtggcaatttggtcaccagctttaacttcctgaccatttttaattactacatcaaacggttcacctttaagtccaaccgtatcaactcccatgtggaccaatacttctagaccatctttagtagtaattccgatcgcatgctttgtttcagcaatcattgagatagtgccgctaactggtgcaagaactgtattatcagttggtgttaaaccaaaaccatcacccatagttcctttgctaaagataggatcacttgttttacttagtgcaattacttgaccattagcaggagcaagtaatgcaatttcgtttttattcataagtgttattctccctttcctataaaagcgttttcacaaaattcatttattatgatattcctgtacgtacaagttgccaatagatttttatgaaaatgattacatgcctgcaatatagtttttagatatatctattgacatgtacgtacatcaaaaatataatgaacatgattttaagaaaggacaaggtcaagatgactaaagcaaaatctgaactgatcgctcaagacttagcttctaagattaaacatcaacaatttaaggaaggcgagcgcttgcctagtgaaaatcaattgacagagctttatggcgcgtcacgcgaaacagtccgtaaagctttgcagcaattgacctcgttaggattaatccaaaaaatcaagggcaaaggttcgatcgtccttaatttggaaaagttttcatttcctatttcaggaatttctagctttgcggaattaaataaatcattaggaatgaaagcaaaaactaagctacttaatgatgaaatggttgatgatttgccggcaattttcaagaaattcttccctgaacaaaagaagcatgcagggatctatgttgaacgtttaagaatgattaacgatgaaccagaagtgctggactgtgatttcttatttaatccaccaattactgagcttccgtcagaagaagcagaaaaatcaatctacaattatttagaaaataaattagggctagatatatcctatgcaactaaggcaattacggtagaagaaatcgatgctgatttacaagagaaattgcaattggatagtaaggaagcagtactagtagctagtcataattttttagcagatacaacgctgtttcagttaactttatcctttcataatcctaaaaagtttaaatttattgactttgctcgtagacaaaaaattaagttataggagataaaaatgacagatttaggcaaaaaagtaatttaccaaatttatcccaaatctttttatgattctaatggcgatggagtaggtgatattccagggatcatcgctaaaatcgattacatcaagaagcttaacgttgatatgatctggtttaatcccttttttttatcccctcagaatgatggcggttatgacattgcggattattaccgaattgatcctcgctttggcacaatgtctgactttgaggaattaactaaaaagctaaaagaaataggcgttggtgtcatgttggatatggtgctaaaccattgttcaaccgaaaatatatggtttaaaaaagctttggcaggagacgaaaagtaccgcaaattcttttacttaaggaaagctaagcctgacggctccttgcctaataattggcaaagtaagtttggtggaccagcttgggcaaaatttggtgatacgcattattattacctacatttatatgatccaactcaagcagatctcgattggcataacccagaagttcgtcaagaattgttcaaagtaattaacttctggcgttcaaagggagtacatggtttccgttttgacgtaattaacgtgaccggtaaggatgaaaagttagttgattcaactggtgatccaagtcaggaaaagagtctttatactgatacagcagtagtgcatcaatatttgaaagaaatgaatcgctctacttttggtcaagatcctgactcaattacggtgggtgaaatgtcttcaactactattgctaattcgattgagtactctaagccgagtgagcatgaattgtccatggtctttactttccatcatttaaaagtcgattataaaaacggtgaaaagtggactaaagagccgtttgatttcatgaaattaaagcacttatttactgaatggcaagaaaaaatggatcaaggtggcggttggaatgctttgttctggaacaatcatgaccagccgtgggcccttaaccgttttggtgatactggtaaatatcgagagaaatctgccgaaatgcttgctactgcgacacattgtatgcgcggaactccttacatttatatgggcgaagaaataggaatgatggatccacattattcttcaattcatgattatgtagatgttgaagctaaaaatgcttttgcggcattgaaacaaaagggaataagcgatcatgaagcatttgcaatagtaaaaactaaagcacgagataactctcgtgtgccgatgcactgggatgatagtaaatttgctggctttagtgaatcaaagccatggcttttaccaacagatcaagatagaattaatgttgaaaaagaattacacgagggtgaaatttttgcttactatcaaaaattgatcaagttgcgtaagcacgaacaactgatttctgatggccatattagaatgtttttaaaagatgatccacaaatttttgcctatgaacgttttttgaaggatgaagctaaaaaaatattagttttcactaatttctatggtactgatcatgtagcaccattgcccgaacaatatcaaaataagaattatcaactcgtattgagcaattattctgcacaagatggcaaactagaagagaatatctcattgaagccatatgaagctttagtaattaaaattaattagactagtataattaattgtgttaaggtaaaaatgttcgtgaagatttcgatttacggacgaggaattcgcgagaagtcatgattttcaggtcatggcttctttttttgcataataagcaaaattatgtaaagtaattgacagcttgcttataatagatagtagagagaaggaaaaacgatgttagttgattctgatagttttatttcagttgaaaagaagctagtcaaacaaggcaagttgcaaaaatttgaaaaagaaaatggtccagttaccagtttaatgatgattagtaaaggaagaattgcggacgatatgcgttatcagttagtcgagaacttggcacatcatccattacatatagtctacaaggcctcatttgatcaatatgatgaaaccctgaattgtattttcgatcgacaaactaaaaagccaatcacaggtttatggtacacgccgcaaagaagagactttactgaaccgcctaagaaaatggtccagctttttatcagtgaaattgtaaataatttgactgattcaacaggaatagatttgccaatctgggtctttatcaatgataaggcacatttggcagttactaagaaagatttgagttaagaaaaaaatcagtgcgaaccctatgtgaacataaaaatgtgggagtttcgcactgattttgttttgtattttatgtgttaactcttctttatatatttttgacatagtataatagttgatgaagccaaatatttaggattggattttatcctagtactaaatattgcggtcgcactccttgtgagtgcttaaattaaattcaactcttgcaaatgcaaaaaagcatccctaatcaaaatagagaagggtgtagtgacccgcatttttcggacactttattgatattatgcgactaaggacttattccgatattctatcggagtaagttcttttagttgtgtgtcgggcatggcatttgtctagtctagtgaaagtctagatcacgggtagttgtcgccaagtgtagcgaaccacaagccgttagcggtgacgctatgggtgaaggaagtggctagcgagttttccgagcctacgtacagaaacctggtcaggccaaatggtggatgagactgcagcacaagttaaagtccaaaggacaaccgtaaaaccaagacggtaaaccagggggcagtggaaaattaaagatgaatgtcttaccccgagagatctcgtggacaggtgaaaccgagtaagctttaatatcagcgatcgtaagcctggtcgaaaaaggttaatcgcgagaagtcagctgaggtcgtagtagtgctgaaggttttgtaatgaaactggagcgaagggcctaatgtttgtaagagcatatctcgctataagcaatgttcagacagtccggataagaggatagcctagcacaaagagaacgtaactctttgatggtgaaagcaattgggacaattctgaataaatttacaagtagaaatggagatatcacgagatggaactaattgaacagattttaagtcaaaataatctcaaggaagcaatcaggagagtcaaaatcaataagggagcgcctggtgtagacaggagaacagttgatgagcttgatagctattttaaaaagcatcaagtagaaataaaggacgccatcatgaagatgaagtatcgtccgcaagctgttcgcagagtctacattcctaaagctaatggtaagaaacgtcctttaggaatacccacggttgttgaccgagtaatccagcaggctattgcccaagtattaatgaagatctatgatcctcattttagtgagcatagctatggctttagacctggacgcagtgctcatgacgctattgaacaagtcttggaatatttaaacgaaggctatcaatgggttgttgacctggatattgagaaatactttgacacggtaaatcatgataaattaatttcaataattagagagcaagtaaatgacaaaaccaccctccatttaattcgagcctttcttaaagctggagtaatggaagatggttgggttaagcctaataaactaggtgtaccacaaggcggccctctttcaccaattctatccaatatctatttagataaaatggataaagaattggaacaaagaggcctgcgctttgtccgctatgccgatgactgcaatatctttgtcaaaagcggtaaatcagccaaacgtgtgatgaattcaatttcatcatggctagaaagaaagctattcctaaaggtcaacgcaaccaaaaccaaagttgtacgaccaaccaagagcaactttcttggctttaccttctggaaaagtggcgaatactggcaagcaaagccaggagatgaccgcaaaatcaagctttatgacaagatgagagaacttctctgtcgcagaaaagcagctgctcagcctctatcactagtctttactaagataaatcaagtagttagaggctgggtcaattactttagagttggcgacatgaaatattttctaattaagttcagtcaatggctgcgtcataaagtacgggtggtaatcattaaacaatggaaactaccaaaacgaatatacattaacttaatgcggattaacaaggcactaaagtgcaattttagtgatgaagatattcataaagtagctaatacgcgcttaggttggtataaaagaagtacgggtcatgtcattaactttctgcttagcccaaaagtatttggcataagcaaagcggatcgcccaggcttggtcgatccgctagaatattatttatctcgtaaataatcacaaacgtagcgccggatacggaaccgtacgtccggtgcaatgagaggggcgagttataaaactccctctactctattatccttagttctttccgtattgtaatagtctatatattttctgatagcttgctctaattcgtcaagtgaagcatatttcttctcctgaccatagaacatttcacgtttgagaatgccaaagaagccctccattaagccatcatctggagaacagccttttctagacatgctttgttcaataccgcgaatagctagttcatgttgataagccttgtgttggtattgccagcctcgatctgtatgaaagattaaaccatttagtgcctgattagttttaaaagcatcatccaacattgacatcacttgtttcagattaggatgacgagaaatattataagcaacgatatcacgtccgcagccatcaataataggtgataaatagagtttcttaccccttagattgaattcggtaatatcggtataccatttcatattcggtcttaaagcaaagaatttgcgtttaattaagtctggtttgattctgcctttaatatctccttgatagctgctatatggatgtctacgcttcatcacataaccgtacaaatccattttgcgcattaaacgattaacagttttacgattaatctgatagccttcacgatgcaaaatatgtgtaatacgacgataacctggggcaacataacgattcttaatctcatcatagatctcccgaatgcgcatcatcacatcactatgatgaacttgatccttatcctcacgagtataaacgtcatagtagttactgcgcgagatgtgcggcagatcttcattagcgttaataatttcaatgatcttctttactgcgagccccagttcatgcctcaattcggtaacagcttgtgctatttctgttttggttggctctttcttttttgaaccaaggcatccaatttttttatatatgcgttttcgacagtaagctttaaattctggcgacgcaacttggcgttttcttgcttgagccgttctaattcgtttaactctttcttgctcatggattcgtcgtcctttcttcttgataacgacattatatccattttctttgtaagagcgaatccaattgcttaacataccattaccaggcaaacctagatcaagtgttactgcattaatcgattcatttcctaaaagcactctttttatggcatgttctttatactcttttgagtaatgcgtataagatttatcaagtactgataagccatgaattttaattaaatttattagataatttaccttttctcttctgataccatatttcttacttaagtacgttccacgtttattttctaaagtccattcttcaaaaatatgaattttatcctttttagttagtttagacatagtaaaaccctcgagattcatgtccgaatttcgagggtcactacagggggatgcttttttaatatcattattgacgccaagcgctatctaatttttgttgaccagccttaatttgagcattaacattttgatgcttatttgcagcaattaaaatattttccataatttgattcataccattataagcagagtcagaattcttagctacaggaacactgtagagatgcttcattgaatcctttaagacacttggcaatttcatcttgctgtctaagtattccttactatttaagacattatcgttaacaggaatatagccagtctcattagcccaagttaattggctagatttgctagtcaaaaacttcatatatttcatggcagcatttttttgtgcttttgaagcatggttaaagacataaagatcagtcccttgagaaatagtgtattcaccgggacgaggagcaacgccgtacgtaaacttgttgcctacacccatcttagtgtagctttcaccagctgaagtaccgatgtacattgcgactttttcattagaaaaaggaccggagaggtaacgttcactaccagcagttctaaagtagccattgcgtacgccatctgcgtagaagttaataattttcttagaggcagccgaatctaacttgattgaacgaccaaaagtttgtccttcattcttgagacctagaacatagtagttggctaagttatcaaaaccagcaccaacaattttatggttggacttttcataaattgctttagaaacagacttaagttctgccattgttttaggtacctttaaaccatatttcttaagtaaggtcttgttataagtcaagacttcaatagatttgttgaagggaataccatattgaacgccattaatttgcgcacccttcattaattcaggacgaatattagatttggctactgagccccaaccataagttgaattattaatgtatggagtcaaattgaccaacatcttattttgcgcagcttgataaagccaaccaggataagcttgagtcattgttggtaagttattaggattttgttgagtagaagtaatttttccttgtaactgagggtaattaccttgattttctagcttaactttgatgttaggattttctttttcaaatttattagtcaattgtttcaaagttttttgttgtgcaccattcattgcgtgccacatagtaatttctgtcttactatttttagcagatgtagtgctcttttgatttgaacaagctgctaaaaataatgctgcagtagttactgcaccaattgataaatattttgttaagcctttctttgtcatcgaattctcctcactaaaaataacattaataaaaatgaaatttaaaatatatttttattttaataagcacaatatcttgtatcacttattaactaatgcaagataatatactactggctaaaaaataaaattcaatccttgactttttgccagcatttataagcattgatatatcaacgactgtttacttaataaaaatattagtagcaagagaaatttaattaaaaacacattttattaaatacaatatcttgtgtatgataaatgtaagaatcaattaagctaaggcaaaataatagctattttatagcaaatatcttataattaataatgaacttaagaaaagaaaggtcgaattttatgaaaaaattagatactactaagcttactgatgaacaaattgaattttttaactcacacttaccatacatggcaactgtgaatgctaacggtgtgccacaagttggtcctaaggcttcacttaaggcaattgatgcttcaactattcaatatcttgaaaagactaagtcaactgcttatgcaaacttgaagaatggttcagtagcagctattgttgtcgctgatgttcctactcataaggcatttcgtgttttaggacatgctgaaattcatgaaggcgacgattacgctaagaagatcgtttcaggcactgatactcctgaagcattcgtagttaacattaagatcgaagaaatcgacgcttaattcaatattttatcgcaatgaggcatccctagcagggatgccttttttgttggtataatgatgagtagttaaagtgaaaatagatttttgaaaaaggtaaattgtgattactagtaaaaagaagccaattctttggttattatcagatacacatctaattgcagatagtttacatgatgatggtcttgcttttcagcatatgcgcaacactagtgcaggtaaagacttagattatcaggagattgctttgaccgcgtttgtacgtaaagtaatccaagagaagcccactgcagtgataattactggtgatgtaacctttaatggcgctaaaatatcaggagaacgtttagctaatatttttaagccattaactaaaaataaaattgcattcttagttttaccaggaaatcatgatatttttgacggctgggctcgcaagtttaaaggtgatcatgaagattacaccccgcaaattagcccagctatttggaaagagatctttgctgattcttatcattatgctttacatgaagatcctgattcactagcttatagcgttaatctgaataagcagtatcgactaatattggctgactcaaatatttatggcaagcaggaatcacaaactcatccgattactaacggtcgaatttcagaatctcaaatgaactggattgaaaaagaattaattgatgcgcagcaaaagcagcaacaagtgctattctttatgcatcataatctgtatcgccataataaagtaatctatcagggatatattcttgataatgcacttgcactgcaaggtttattacaaaaatataatgtaaaagcagtcttttctggccatatgcacgcacagaatattattggtccgtttgctaatcgaccaattgcggaggtagcaggagcttgtttttgtatgactaagcaggaatatggtcagctatatttagacgaagcggggatgcaatatcaggtgcattccttcaaaatggaatcgtggttaactgcggaagaaaagcaaaaagtgccaacagatttttcgcaatatttgaagcatttgttttttagtttggatgaaaagcaactaaatcagattgcgcaagctttatcagataaaaatgatgctaacgtggtcataaaatttatagatcaattgaattggaacttttttgtaggtgaaagtaattattctgcagcccaaaagaaagaaattgttaattcacgagaatatcatttgattgccaaatatttacctggttttaagcgctacgttgattcatttttacaggtagagcaaagtagccataaactgaagcttaagtggtagtgagattagttgctgtaaaacggaaacttctattatgaaaaacgatacagtagaacaaattacaccgagatcggcctctaagtctgttttaccagcaaccggtaggcaagatagtgatctttcatggttagggttattactgtctggcttgagtttaagtggattatggactcgtaagaagaaaacaaaataaaatcgaaagagattgagacactgggtttcgatctcttttttgataggctcaatatcaaggaataaataactataactgctataatgatgatatgagtactaactgatcaaatcttaactgcatttattagatcgaaggttcattatgaaaatcaataaaaaacttatcttaatttctactgcgttattggctgtgtctccaattgccgcagcaccactaacttcaaacgttcaaacatcagttgccgcagctactaaaagcaatgcaactggttccttaaaagtcattgattcacatattatgttgtacaatcgctcgggcaattatttggatcatatttctgcacctaagaaaggcagcacgattaaatactatggaaaaccattttttaagacggttgatccaggcgactacagtgctggtgagttatactatcctttacgcaagaatgtttatatttcttcagattatgtaacgccaatatctggccctgcttatttaacggcaatttttaatgccaatatttacaataagtctggcaaaaaagttggttttgtcaaaaagggtagcgtagtcaaatatgctggtaagcggaaaactactagtagtaaagcaaagtattattatgaggctcaaaaaggtaagtatcgcattccttataccataattaatggaaaagactactattatttaggttccggtcgttatatcaaggtggccaacatcggttacattgacggctatcgtcttactactcatgcaccaattaccgtaacggtcaataagaatacttcaaccattacaaagtatgttaattcaacaggttggggtacagatccaaataatattgaattgaagaaaggacaaaagatcacagttgattatgcgggacaattcccacaacaattgacagactttgatcatgatcactattcatactaccggatcaagggcactaattattgggtatcagaagatgatctgaatttgccacaagctttagagaatcattcagatcttgaattggccgattctaccaaagttgtcttggataaaaagattcctttgtacaatgttgacggtgaaaaaactagccaagagctatctaaacagttttataccaatacggttgaagaaactgcaatgtatagcaaccataaaattaacgaagccctttatctttgggtgccaagtgaaaagaaagccgaacttttctaccatacaacaggtgaagttaatgctaagactaataagttagataatgaaggctatatcttagctagtgatgtcaaaaaggttgaaggtgtgaagcttacaccaataaacacagctggcgaagcagagtcacttgctaaagtggcaactaacaaagcatcgttgactgctgcaatctccactgcagaaaatgtgcaaaagacagatcgctatcagttagctgattatgataagaagattgaatttacaacttatttacagcaagctaaggctattgctagtgatgcagatgctagtgaaattgcagttagtcaagcagaaaagtttttaactaatagcaccaaagcacttgatggtaaaaaattacttgttagacgaactgaccagttaactacttatgaggttcaaaaagtgttgaatcttatctacaattactatcagccgcaagttacaggcaaacttaacgttcaactttataacagcaaacgtaattggcaatatccaacaactcgtccagtatgggatgttaccaagaagagtccattttggtttggctattcttcagataccattagaaagcgcaaagtcgatattagcccattaatcactgatggcattactgttggcaagaaaaagaaattgcaaagtaatgcatacgtttataccgctgcaggtgtgaaaactagaaagctgttgaaaaagaatacttcttataagattcaagccattacaactattaaagggcaaaaatatgtcaagattggtgcaaataaatacgttaagtatggcaacttcgaagcatctaagctaaaagtggtcaaacgttactacactgtccaaactgtaacacctgtggtaaatgcccagggtaaaaaagttgacgaaatcaagtcaaagaataccaggacaaagaattatgtccaaacttatggcaccaagaggatcaaaggctatgattacattaagataggtagtaatcgctataccaatatgttgggatttgaatatgttttagcgaagtagggttcgattgattatttagtttatgttaaaagaagcactgtgttggtgcttctttttttgtacctacactacttgttattaaatggggcttcggggtagaataaaactatatttactttaatatttagaggaaaaacaatgtctaactttgaaacttcacaaaaagattatcaagaatacgcaaaattggcttccagcgctgaaagcttaatttactctgatcctagaagtagtttgacagttttcggaacttttggtgagcaattaactaaggaaatcatgcatttggatgatttaggtgattgggaattaaaccaaaaacaacgaattgaaaaaatggcatattctaagaatgaatatccacctactgttttgaatgctcttaatttgatcaggttaagacggaacaaggcagcgcatgacgatcattttattgctaccaaaaagattgcgcttgaaattgatcagagtgcttatttagtatggaaatggtttttagaagtttattctctggatgaagttgcagattatgttgagccacaagatcaaaaagctttaattaaaactcaagaagataaaatcaaagctctcgaagaaaagataaagcaattacaacaaaatagggtgcaggaagtcataatttctcctgaagagcgtgaacgcagacgtcagattaatgttcagtttgctaaaaaacatgagttaactgaagcagaaacacgtcagttaattgatcaacaattgcgagatgcgggctgggaagtagattcacaaaaattgaacaattggacgcagaaaactaaaccgcaaaaaggtcacaatatggcaattgctgaatgggttctacctaatggtcagcgagcagattatgcattattcaaaggtttggagttctacggaattgttgaggccaaaaagtgggaccaagatattgcagggcaaatggcacagcctaaggaatattctaaagaggtaccgtttagatcagattatcgtctagtttcaaatgaaatgggtgattacaaagttccattcatctatactgcaaatggtcgtccatatcttaaacaatatcaggaaaaatctggtatttggttctgggatgcacgtaatcctaaagaaagcgcatatgctcttgaggaatttcataagccagaagatttatcgttgaagctttctgctaaaaataaagaagaagcaaatcaagacttggtagatgatcaagattttcctgattttgcacatcgtgaatatcaaattactgcaattcaagcgatggaaaatgccatcaaagatggaaaaaagcgtattctgcttgccatggcaacaggtactggtaaaactagaacggcaattgctttaatgtacagactacttaagcataagagagctagacgtattctttacctagttgaccgtaattcattagggaagcagactgccaatgcaattaaagataataaaataggtatgatgtcaatttcttccatttatggattaaaggaattgagtgataaggcacctgaaatatcaacaaaaattcaaattgcaacggttcaggggatgatcaaacgcctatttttcagtgaagacagtgatgataagccatccgttggtcaatatgatttcattattgttgatgaagcccaccgtggttatgcagaagataaagagctcagcgataaagaatatcaattctatagtcaagaagattatgttagtcaatatagacgtgtagttgattattttgatgcgactgctatcggaatgactgctacgccagctttacaaacgattgatatttttggcaaaccggtgtattcgtatagctaccaacaagctgtccttgatgggtggctagtggaccatgatgcaccagtaattattcaaactcaattatctcaagaagggattcattttaaaaagggtgccgaggttagtctttttgatcaggatgaaaaaactatcaataaagaaaaattacctgataatatgaattttgatgtaaaagactttaataagagagttatcacacgtagctttaatgaagtagtttgtgatgaattagctcaaagatatcttgatccaagtgatccaaatttaggtaaaactttaatctttgcggcaactgatgaacatgctgatatggttgttgacttattgaaaaaagcattcaaaaaagcgggtaatcctgtagatgacgatgctatcgaaaaaattactggttcaattcggcatcctaatcaagaaattaaaaactttaagaacgaaaccaaccccaatattgcagtaactgtagatttactaactacgggaattgatgtaccgcaaattactagtattgtcttcttaagaagagttcagtcaagaatcctctatgagcaaatgttgggacgggcaaccagactttgtcccgaaattaataaatccaaatttacgatttatgatgctgtcggaatctatgaagcaatgaataaagtgacaaacatgaagcctgttgttaaaaatccaggacataatgttcactacttcttaaatcacaaggatgatttctttgagacaaatgaggattccgctcagtatcaagtagatatggctggtgccgttgagagaaaaattaaacgtttggatgatactaaacgtgatgagttccaacatctggctgaaattaattcggttgatcaatgggcccgtgaattaagtaaattagataagtcacaatttttaaagcaatggcctaagtttgagcagttagaccacattagcccagtcaaatccaagcaaataatatctgacgcagtagacaaagtagttaatgtaagtcgaggttatgggcatggcaatcaaaaaccagcggattatattgaaaacttcaataaattcgttaaggaaaatgtcaatactattccagccttacaagttgtagctactagaccgaaggatttaacttttgatgaactcaaaaatattaaacttaagctagagcaaaatggctttaaagaaaatgatttgcaaagtgcatggaaaaacgttaaccatgttcagaccactgccgatattattagcttcattagacaagctgcggctggatctgagttggtggatcatgatgtcagaattcataatgctatgcaaaaagtttatggcttagctgattggactattcctcaaaagaaatggttgaagagaattgagaaccaattaatttcatctactgtattggggccaaatgctgagaaagcctttgatgataactatttctttaaacgtcacgggggttataagcaaattaagaagatctttccagaaaatgctgatcagattatttacgtgttgaatgagaatttatatgtttaaaaatgccattactggcattttttgcttttaaccacgaaaagttgtgataaaaaaaggtgcgtgctaaacttaaattaacacggaggaatacaatatgttaatcgagttcactgttaaaaattatgcttcttttaaagagcgcactaccttgtctgcagagacaggcaatagactacgtaaattgaaagaaactaatactttctcaagtaaaaatccatcattattaaaaagcttactgttatttggtccaaacggttcaggtaagtctcaattgattcaagctttacaaacaatggaaggaatagtaacacgtccaactcaagccgtaactgataagttaaattattatccttttttgtttgatgaaaagtccaagattgaagatacttactttgaagtgaagcttgagttaaagaataaaatttatgactattcatttagttacaatcgagagagcattaccagtgaagcattaaccttaattaatggtaataaggaaaaaagcatcttttctcgaaatggaaatgacattcatgtttctaacaagcttttagaagacagcattcctaagcttagaaataattctttattcctatatttagcacaatctgaaaatgatgcagattgtattgctatatataagtggtttgctgatgatttactttttattcatgataatcttgcaatgtttagtcaagaaaaatttttgagccaacttgaaaataaaggcttgagaaaagaaatagtatcttttctaaattttgctgatcttaatatttataatattagacttaaggataagccatatcatttattgaaaagaatatatatagttcataagatttacgatcatgataaaatgattggcttgaaagaaattaagctagctaatgagtctacaggcttacagcaaattctacaaattgtattaagtatagtatttgctcaaaatgagggcaatgatataactatagttatggatgattttagtaaagcatttcatattgaactagctagtgcattagtaaagatctttaattcaaaggaaagcctgaatcagtttatagttactacacataatgtacaattaatggataatgatttaagaattgatcaaatctatttaattgataaagattttcatgggataagtaatctaaaatcagtttttgattttgaagacgcacgcaatataggtcgacatgatatttcttttgctaaaagatatttacaaggaaaatttggtgctatgcctgtaataaatatagatggcctgtgtagcatattaagtaaataaaagttatgtagtccaaactaatatttggtaaaataataaaattgatacaaaacaaaggagcaaacccaagtgaaaaatcaagaaatcgttcaaaagttgtggaatgagtgtaacgtcctgcgggatgatggtgttagttaccaagactacattactgaattaacttatatattgttcttaaaaatgagcaaagaacaaggtgaagagaacgatattccagaaaaataccgttgggataaccttgtttcaaaggacggcttagaattaagtaacttctataagcaactattacttgatttaggtaatcctcaagttgttaaaagttctagaattaacgcaatctatgcagatgcatctacttcaattcataagccagcaagtctagaaaagattattaaagatattgatggcctagattggtggtcagctagagatgagggcttaggtgatctttatgaaggcttgatggaaaagaatgcaaatgaagttaagtccggagctggtcaatactttacaccacgtgtattgattaatatgatggtaagaatgacacggcctaaattaggagatcgttgtaatgacccagctgctggtacctttggatttatggtagcagctgatcagtatcttaaagataaaaatgatgactactcatctttatctgaagaaaaaggtgagtttcaagttaatgaagctttctccgggatggagcttgttgaaactactcatcgtttggctttaatgaatcaatatcttcatgggatgaatgggcgattagaattaggagattctctttcagcaaacggtaattggatgaagaattttgatgttgtcttaaccaatcctccatttggtaccaaaaagggaattgataacgataaagcggctagtcgtgacgatattacctttgagacttcaaacaagcaacttaacttcttgcaaattatctacaattcacttaagcacgatggtaaagctagagcagccgtagttgtgccagataatgtattgtttgcggatagcgttggtgaagcaattagaaaagacttgctcaacaagtgtaacttgcatactatcttgagattgcctactgggattttctacgctcaaggtgtgcagactaatgtgttgttttttactcgcggtgaaagtgacaaggataataccaaggaaacttggatttatgatatgcgtcaccagatgcggtcatttggtaagcgtaatccattaaatgaaaaggattttgcggaatttgaaaaactattctgcgttgatgaccgctcaaagagaaaagaaacttgggataaagataagaatcctaatggtagatggcgtaagtttacgattgatgaaattttgaagcgtcctaatactagccttgatatttcttggatgaatgatgaagaagagcatgataaccgttcattaaaagaaatcttagatgagatgaatgacaaatctaagacgattagggatgcaattgcggaacttaataaggcgttagaaggaattgacgatgaagactaatactttagattttgatgcacaggctttaagagaaaaaatcttagatttggccatgcgtgggaaattagtaccacaggatcccaatgatgagccagctagtgtattgcttgagaagatcaaggctgaaaaagaacagctaattaaggaaaagaagattaagaaaagtaagccgcttgctccgattactgatgatgagaagccatttgatattcctgaaagttgggaatgggttagattgggagacttatttgatataacatctagcaaacgggtaatgaaaagtgaatggaaagatacaggtattccattttatcgcgctcgtgaaattgtaagtatcaaaaatcatagacctttaaaagatcctattttcatagataaaaaaacttatgaagggaagataaaaatatcaggtaagccaaatattaatgacattcttctaacaggtgttggtacactaggggttccgtatatagtagataatgataaaaaattttattttaaagacggaaatattatttggctaaagaaccttattaatttaaatcctaaatttattagctacgtagttcaaagtccatatatgttgaagaaaattaataatggtagaggaacaacagtagctacactaacgattgttagatctaataatcttttgataccacttccaccactagaagagcaaagtcgaatcgctgctaaaatagcgcagctattcgctttgcttcgcaaagtcgaatcttctactcaacaatacgcaaaacttcagactttgctgaagtcgaaggtgctggatttggcaatgcgtggaaaattagtcgggcaagatccccatgatgagcccgcaggggttttgttgaagaagctcaaggtgttaaaagaaagtaaaaaacaaccgcatacaattcctaaaacatggaaatggatcgtattgggatcaggagttaatttttttaatggaagagcatataagaaaaatgaattacttacgaatagtaaattaactccggttttgagagtaggtaatttatttacaaattcgtcttggttttattcagatttaaagttaagtgctgataaatatattaattctggggatttaatttatgcttggtctgcctcttttggacctaaaatatggaatggtggacgtgtgatttatcattatcatatttggaagctagattttaatcctatcgtaataaataaaaattatctatattattatttattagatgaaagaaatgtgataggagagactgatttacacggttctacgatgaaacatattactaaaacaaatatggaacatttgtcttttccacttccaccgctaaaggagcaaagtcgaattgctactaaagtagcacagctctttgccttgcttcataaagttgaatctactatacaataatatttacccggatttaaaattgaagtgcaacactaagtgttaaacaaaaaggccatgaagacctaaacttgaagtgaccaaaaatcaagaaaggaagatcttcatgaccaactcaaattctagcatttccaagcattatcatcaattgaacagcgaacaacgtggacaaattcaagctctgcttgattctggcataacatcctgcactgctatcgctcaagaagtaggctgtcataaatcaactatcagccgtgaaattagacgaggcagtgtcctgcaaagagacagcagctatgtcttgtatgagcactattacgctgatactgcacaaatttatcatgaaaagcgccgcagaaactgctataagcgtaatccactgcaacactatgccgtctttttcagaatgctaagcagacgctttaaagctaaatttgatgccaccagcatcgatgaatttgtcggtgaatttcacaggattatgccaaattatccatgtcctagcacgcccactgtctatcgttatattgatcaaggattgctggatataagcaatatcgacctgccaatgaagcttaaaagacgcagaaacaaacgccatcatagtcatggtggccatgctccgcataaaaagaatcttggcaattcgattgaacagcggcctaaagaagttgaaaacagaaaagttcccctgcactgggaaggcgatttggttaaaggcgtcagacgtaaaaatcaacctgccttaatgacactgactgaaagaaccactcgttttgaggttgttatcaaaattcctgactatcgggtcagtacttgtcaaagactgcttcaaaaggagattgacagacatcctaattggtttaaatcaattacgtttgacaatggttctgagtttgcggatatgaccaagatcaaaggatgtcagatctactttgctcatccatattctccttgggaaagaggcacaaatgagaactgcaatggacttctgcgtcaattcttccctaagggcaaaagcatgaaagataagtcagctgcttatgttcaacaggcaactgatgccattaaccgcaaacatcgccgaatcctccaatatcagacagcagaagaactcttcaagcaatatatctcttcataacctaactgttgcacttaatttgacaattcaggacaataatatttaaaattttaagatacactgaagtcagggaaaacaaattttatcttaagcggaaaattaatcgagtaagattaagaacattagacctttcttacaaaaatatctaataccgatagttgaaaatagatgagaatctttgggaaaatgttttcaattatgattgattgaggtagcgtatctatttatagctatttggagctttagatataatttctgttttttatttaatcgattgttatttttaatttataaaagttaatacgcgtggtgctagttaaatcgttttagttaataaaaaagtccaatcttgttagactcaacttgtataataatagaaaagagcctgatctgattgaactgccttaagcttaagcgttttagccaccatttacaagttagttttaaagatttagtgataatttgtcggcactggtatcgtttgtatgcaccggctgagtttactcatcggcgaaatattgatcaaattaaaactacggacagtctgattttggctttacttatctggcaagctaagacaggaattgaatcacaaagaagattctgtgaatgtttcaattgtttatcacactcacgttttaatcggcgttcacgtcagctattgcaattgatttatcagatacggcaagaaatgaataaaaaggttgacctgaatggacatttcttgatcattgacagctttccggtacctgtttgccaaccaattcgcaactatcgtgctaaaatttttcgcggttatgccaacattggttataaggccaccaagaaaatttacttctatggtttcaaagttcatgccattgttagcgatgacggttccattcttgattatgtcgtaacaaaagcatcagttcatgatgccaaggagacagttgaactgctggaaaatgcccatccatctaattactatcttcttggcgacgaaggctatttaggcaaagaactgcatcaacagctaaaacaaatgggttatgaactttggacaccatatcgtaaaaatatgacaggagctaaaaagcacaatgatcatcaattgatggctattcgcagaacaattgaaagcgacttttcgcttctgacctattacaatgccgagaacaatcgagcacgtagtctgataggctttcaaagccggttggaaattgcaattttagcttataatttggcttattgtctagaaagatttaactagcaccacgcgtaagttaatgcaaatttattggtacgtagtaagtcaattatcttcatgatgaagtaaaagtatttggttattaacatgtatatgttattgacgtatttaacttagattttttgagttttcatacatgaatggataactcaaattaacacagcaaaatttaaacaaatgggtaattttaattattttctatgtttaatgattagtaaacattgtattttttaagagggtaaaaatatggtatacgtaaaaaaactaatattaaataactttaaaggatataaaaacaatgcaatttttacatttaatcaaaataaaaatatccttgtaggggataatggaataggaaaaacgacgattgtacaagctttaaggctgttacttaaaggttcaaggtacgaatataatggtatttcatatttggcaaattatataaatgatgaagttgtaaataattttatttcttccaaaaattatttgtatactaatttacctagttttgatctgacagtgatttttggtatagaagaaacggatcaaagaaatctgaaactactacgattctgtggaaattaccaagatagtaatgggtctattaaaagaaatggttatggtattacttttagatattcatttgacgaagattttaaagatgaatacaacgagttgattagagataaagattataaaaataactttataatcccatatggaatgtataaaacagaccatagaactctctcgggtgatgtgtatagtagtagaatggatcccttgaaaagtatatttattgataatgatagttttgaaggtaatccgttcaatatatttgctagacaaatatattccactttaccacctaaaaaaagagttcaagttgaaagcaaatttggatttattaataacaacttgtttgatgacattaatagaaatgatcttgcggaatataatttaagaatagatacaaacagtttaaagtttgattcaattattgatgttacttcaggaagaatttctattaaggaattaggtagtggattagaaaatcttttaaaaacacaattaagtttaaatcaagataatacggattctgcacatttaatcgtaatagaagagcctgagaatcatttaactgcaagcaatactagaaaacaaattgatcaattgaataatattaataatcaaattatagttactactcataattcatatattgttacaggtttagatattgaaaatttgatctggatcaaagaagaaaatggattgaagaagcaagctactatcaaatcggagttaagcgaagaaacaaaggaattttttaaacgaagagatgatgttgatttcttacgtcttttgacggcaaagaaaataattctagttgaaggagctgctgaatatatattgatgagaacgtttatcaaaaaagtatgtaaagaagacagattagattttgaaattttatcaataggtggaagacattatcagccatttattgatttagcaaagtatgcaaataataaaatggctatttttactgataatgatgctgatgtagaaaaaccagcagacaaaagaataaataaaatagatgacgataataagaaaacagaatcggtgaaaatcttttgtgatcagcaaacaaaaaattatacttttgaggtttctgagtataattctaataaatctataatagagaataagtttccggttaatccatacgccaaaacaagcaaacatggtgacaatgacgtagcttcaaaacaattagcgtatatgctaaataataaaacagagagtgcgcttgctatgttaccaaattatgagaaggaagtttatcagatacctgagtatatagtgaaaggtttaaaatggctcaaggaataatctatttggcaaaagctggtacaggtaaaacaacatttattacctctggattaaaaaataaattagagaacaaaaatgttttatatataacttatacaaatatgaatgctgaaaatctaaaaaataagcttcaaaaaagtttgataaattttaacggatacaatgtgttaacgttttatgaatttatgtatagagaactaatcaaaccgtatagtttatcaatagaaaaaaatctgcaattaccttataaaattaaaggagtttattttagagaacctggggtcaaaaattttaaacactttatatcaaaggcatcctataaattttgggagaatagtgtaggggacttatatggcgataagctcgctgcattattaactgatataagaaataaagaagtgtttgaaagtgcaatagatcggttatctaatttttatgattatataatttttgatgaatttcaggatgtagttaatccagagttgcatattttaaataagttgtctaaatctatctacaagagggaacatacacaattaatactggtaggagatttatatcagtcgtgtgtcactaaaacttctaaaaagtcttccccttatgataagtttaagacgagtatgagtgaagaagcttttactagaaaaaatttaggattaaaaaaaacatatcttaaattagatcaaacttcgcttaatcgaagtttccgagtaccgaaaaaaatctgtgattatattcgaactaatttaaaaataaatatttatggttcagtagataatgaaggagagattaatgttgtaaattcattaaatctccttaaagatattttaatgagcgaaaaatataaattacttacatatgacaaacgaaaacgaaataaaattatccaaaaatatggtgttgatgaatctagatttgtaaactatggtgagtctaagggattagaatatgacaatatagctatatttttgactgaagctttgacagatgcaacaaatagaaataattttagtgaaatttcatcaatttccaaaaacaaattctatgttgccttaactagaacaaaaaataatgtatacttgatcccttctgatcttcctttatcatgagtttatagaaaagtgatggaaatttctattttttaaattttagatcgaataaaaaaggtagttttaagtgacacatgatgccatagaaaggactacacctatgcaattccacaatcctaacgatactatccatgttccaccacaagatatttttgaagacttacttgatcaggtcgaaaagttgcaaacgcaagtggacgaactcaagcgacttcaatatagtaattccagcaacgcacgtgatgttttcctatatggttgtgaattagctggcagtcaataccttgatctagcggatcatgttgtgccaaagttgcatgaaaatgatccgctagctttaatgcgtgaacccaataatgaatttgacgaacacgcaattagcgtgtatacaactggtggactcaagctaggatatttacctaagagcaataatttgatcttaagtcgtttgatggatgaaggcaatttgttgtttggcaaaaccaagacttttcattgggacggcaagagtttgtatctggtagtgaaggtttacatgagagcataataaaaggcatcacattgaagtggtgcctatttgcttaagcaatttgtctaggatttacatcattcgcatattcttttaattcgcgcatgctgtatttcttgccgaagatgctatctttatcaggaaccaaacgatagctattctttaacgttctcataaatttattggtgaaaccatttttcttttgaccgtaaagcgtatgttgattcagccattgttctgcttgatttcttgatagatatttcatgaaatcttccttcctaatatttagaattgcaggtactttgactgtatccctgtacacactattgtagtgcttaaatggccgaaagtataatgacagctagaaacatttttctggccactttttagctgataaataaatgataaaatattgttgattagaaagttggggatgaaatgaaaaagatcggaaaagtatcgttagttttgttagcaggtttagctttgacgggatgcagtcaaaagtctaagcaaaatactgcatcaaagaaaaatgcaactattaaaattactaaaaataatcaaaagcctacaagaatggggcatttatctgctcaggacttaagtccacaaaaaactgttgcagttatagttgcctatgcaggtaatcgttactctggcagttggaataaagtcttgcttaatgataagcgaaacggactcgaagttgacttgaagaatcaatcagattattcatatatgaatgaaggttgcggagtagcctacatggtttccgaaaatgcaggatatactttgaaacatgtaaatagtaaaaatatttattatctctttttaaatggtaaaaagctagaatcagttactatgaaagaaatgattgcttatttgaacaaacgggattcagacaagttggtgaatagcttggctaaaaatgccaaagttaacgatgaacgctcagattctaataatgtttcttcaaattctactggtaaaaaatctaatttgcctggagatgatggcttattaaatgtgccgacagaactacaagggacttggtacacttatcctgctgctgataataaactggaaactattaagattagtcaaaacaaaatcgataatggctacagttcactagaattacataagattaacgctaaatttgctaacgatcatttatatagcgacatgtctaagtcttatagaaatgctactaagaactggggcatggcacagatgatagggaagaagatccataacattaattacttgaatgtccgcacctggatgcaaggtgctggtgacggtatttattatggtgctcatacggaaagcggtcagtctgttatagttattggtgaaggtgcagaattatggacaaatagtgttgcttggaagacaccgcaacttgcacaacagtataaacacaagaaatttagagatttattctatcaggatgaccaataaaatgaaaaagatacctttaatcttaatgctaggaccacaagcgtctggtaaatctagttttattaagatgaataatttacaaaactatactatttctggagatgaaattagaattcgcctaaatgggatcaattctaataatggtcacactcagataaattttgtcccgcaaacagaatcaattgtatggcatattttttatgaagaactagacacacgtttgcagaataagttgccaactgtcatagataatacgaatctggctggtcatggattcaatccaatcagcgatattctgaaaagagtgccagtcgattatcaagtatatgtcattgattgttttaagccattattggactccaaagatccattcagtgaggagtctctagatcatgcattaaaaactcttgtgcagcgcaatcgtgatcgagaatattcagtgaatatggatataattaaacgttttgttggctattataaagattttaaaataccagataaagtcaaagtgatcagttctgcagatttgcagcaagcacaggatataatcgatatggtgttaaattatcgataaacatgtctttcagagattttgatataatcaggacagaataatggatgaagacgataaattccaaaaatcaaataaattattagatataggcgctgaggcctaccgcaatggtgattacctaaaagcacaaaaatattatgaatatgcagcaaagctaggtaacactcaagctatctgtaatttgggctatatttatgaatatggtcgtacaggtaagcgtgattacaagaaggcgttttactgctttaagattgccgcagatgacggtaatgcagaagcttgttataaagtaggagatagttacttctatggagatgcaataaaacaaaattacaacttggctcttgagtactatatcaaagcagaagattttgctaataaatctggtattgatgatgatattaaatcagatatttattatcgtttagcgctatgtttgtacaaagggtatggtacagatgaagatccattatctgcattagaatacataaatgaagctgaatattactcttattgtgaccactttgaagataaattcatgtggcaatcaatagctaagagaattgaatcactaagagctgagattttacaaagactagatgaatatttaaaaaattaataacatcgacgagtcgcatccctaaaccggacgcggcttttttaatctgaaattttattaaaaataagaccagagcttttgtgttgtgtttcattgatacgataactacaaataagattataataacaattgctagataatgatgtgaaaaatttattcatacataaggaagaatgattgatatgactttgacaggaaagaaaacactgaaaaataaattacagcaaaatgcggatcaagttcagcattttggaatacgtaaattatctatcggtgtcacttcagtgttgttatcaactttgttttacgttggtgcgattaatacaaatactgtacaagcaagtacggtagatagcgatgtgcaaactgcgaaagtagtacagaagaaagcagattcttcggtgcaagctggtttaaataaagataaaacagatgatgtttctggtaaggctgctgaaccaacttctcaagaaaacgataatactgcagataattctgttgaaaatcatacagaaaataatttgacagtctctaaacccgaatcaactattaaagctagacaattagctgagagcaaagtaaaaaattctaatgttcaaattcaaaatgggggggtagagcagcctagtgcaactgctaagccaatcgaagttcagcctaaccaggatgccaatgctaataaggcagaaatcggtcaaggccaagctgaagaaactaacctatcatgatggtgactttatcatccccgcaggttatgaattagtaagtatgttaccaaccagctataaatttaaagcttctgacaatgatccaattgatattcatttgaagcataaagtaatagttatcacaccaaatgatccaaagcagtcaactgataagttgccagataatccaagtaagaattatctaactggtgttagtcaaaatgatttaaacgaaatgatcaaacgtcaaattacggtagtcaagcctgatggcagtaccattgatgctagtcaattgataacgctaacgagaactgcgacattagatgaagtaacagggaaggtgattaagtatagtaactggacaattggtagttttagtgaatacaatgccccagaaattcaaggttatactccaaatcgaaatgccaaagctgttgaagttgttaaacatggtgatcactttgaacctattaagatcacgtacatttcactaggttcagacactgatgatacgaaaactggtgattatccaggaaatacatcaacaacttctcaatctaactcaaaagaagtagagcatgttcctttgaaaaataagttttggatcaaggggcaaccatattccttgcttgatctacttcataatgatccttggacttctaaattcgagggtggcactatttatcaagcatttttaagtgccttaagctatcaccgttggaacagtccagttagtggtaagattgttaaagcatatcacatcaatggtagctactatggtgaagcgttaagtcaaggtttcgaaaatccaaatggtgctgctccagtagctgctaatgactcacaagcctttttaacttcaactgcaacacgtgctgtaatctttattcaagctgataaccctaagataggcctgatgtgctttgtagccgtaggtatgggagatgtatcaaacaacgaaattactgttcgtattggacagcatgtcaaaaaaggtgagcaattgggcatgttccactttggtggttcaacacatgtcttactgtttcaaccgacagttgatttagactttaatcttcacggtcaaaaacctggcattgattcaagcaatataaaggttagagacgaaatagcagtagtaaagtaaataaatgtgatagaggattggacttatatttaattgctgtaagttcaaccctcttattttgattaaatctttgatacaatagacatgattaaataaatagggtgtgatctaaattctaaaatctaaacggcatttcatgtttctaggagttgcaggaattatctattattcttggctcttaatcgttctatttatcgcctttattttgggctatgaggggaacaaagcaattagtatacctggaatagtagttggtatcattttcttacttttagcagtttatacttggtccttttcttacttgcaaaagggtggagacaaaatattactcaagttgccatatcgttcaaaagtaaaaatcaatcaaatgactttgctttcaagttggcgtaattttcaagtttatcaactaaaaagtgattaccaaagctattctgttttaatgatgtctagaaagaagaataagcaataatgaaatcagatattgaaatcgcacaagaaaccaaagaattacctattaatgaaatagccactaaggtaggcttgaaagaggaagacttagaaccttatggtcatgataaggctaagattacttggcaagccattaacaggactcgtgctagtaaaaagttaggtaaattagtattagtaacctcaatttctcctactcccgctggggaaggtaagtcaacgattacaattggcttgggggatgcaattcacaatcagttgcaccagaatacgatgatcgccttgcgtgaaccttcgatgggacctgtttttggattaaaaggcggtgctacaggtggtgggaaagcacaaatcatccctatggaagatatcaacctacacttcacaggagatatgcatgctttaactgccgcaattgacacacttgcagctttagttgataactacatctaccaagacaatagcctaaatcttgatcctgaccgaattttacttaagcgtgggcttgatgttaatgaccgtgctttaagaaaaatcacggttggtcaaggctctaaattcaatggtgttgagcaccaagctagttttgctattactgttgctaatgaattaatggcaattctctgtttagcaacagatatcaacgacttaaagagtagaattggtgatatgctagttggctacactaaagatgatgagccggtttatgttaaacagttaggattccaaggcgcaattgctgcactattgtctaatgcgctgaagcctaacttagtacagaccttggcacacacaccagcattagtgcacggggggccttttgctaatatcgcgcatggagccaattccgtcattgcgacaaacttggctttgcatttaagcgactatgtattaactgaggccggctttggtagtgatcttggtgggcaaaagttcatggactttgtctcaagacatctggacaagacgcccgatgctgcagtagttgtagcaactgttcgtgctttaaaatatcaggcattaggctcaactgatcatttaaatgaagaaaacttggatgcattgaaagaaggatttaagaatctagaacgacacatgaataatatgcgttcatacaatgtaccagtaattgtcttgatcaatcgttttgcttcagatactgaacaagaactcgctttacttaagcaattaattgaagaacaggccgttcaagctcaagtggttacttaccatggtgaaggttcaaaaggtggcattaaagctgctcaagctgtgattaatttagctaattctaatgcagcaaatttaactccaacatacgcagataatgacgatgttaaagataaaattgaaaaagtcgccactaagatttatcatgcagccggagttgaatacagcgaaaaagctgaaaaacaaatcgaagaattaagaaagttagacaaggctaacttacctgtaattatcgctaaaacacaatattcattcactgataataagaatgaattaggtgctccaactgattttaagcttcatgtaaagggaattagtttaaaaaatggagctcgttttatcgtagtcactactggtcacgtgctagatatgcctggtttacctaagcatcctgcagccttagacattgacgttgataacaatggtaaaattagtggattattctaaaaaatatgcaatttttatatttaattatttcattagttgtcgttcttgctgatcaaggactaaaaaattatattgttgctcattatgctataggagaagtacaccagattattcctggaattctttcttttaattatctacaaaataatggcgcggcttggaacattttaactggtcaaatgtggcttttttacattatcagtattattgccattagtgtttgcttgtattttctttttaacaaaaagtacaagaataccttgtttgatgtgggtttagccctcatcttaggtggaattgttggtaattttattgatcgtttgcatttaaaatatgtagttgatatgcttcagcttgattttgttcacttcaacatttttaatattgcggattccgcaattactgttggagtaatccttgtgttcatttacttaatttttattgaaggtaaggaagaacaacatgactaaagaatattcacttgaagtaaaaaacgaaaagggacgtttagataagtttgtttcagaacaaattcctgatctatctcgaactagagttaaagaactggttaaagaccaaaatattctagttaatggcaaagtcgaaaaagtatcttataagattcaggcgggagataaaatcgaagttaatattccagcggttaaaccgttagatgttatacccgaaaatattccacttgatatcgtgtatgaagacgatgatgtcattgtagttaacaagcctcaaggtatggtagtgcatcccgcaccaggtcatccagatcatactttagtaaatgcgttgttatatcacaccaaggccttagcacaatcaccagaaggatttcgtcctggaattgtccaccggattgataaagatacatctggtttattaatgatcgctaagaccgccaaggctcgtgaatcattagaagatcaattggctcataagactaacaaacgtctttattgggcaattgttcatggtaattttgcggaagaaaatggggtaattgatgcaccaattggtcgcaatccatatgaccgcaagaaaatggcggtagttgaaacaggcaaaaaagctattactcacttcaaggtgcttgagcagttcaaggattatagcttaattgagtgtcagcttgaaactggaagaacccatcaaattagagttcatcttgactatattggacatccggttgcaggagacccattatacggtccacgtaaaaccttgaaaggtcatggtcaatttttgcatgctaaagtattaggatttaaacatccaagtactggcgaatggctagagtttagtgtagaaccaccacaaatttttcaagaaacgttggctcaactagaacaaacaagtaagtgataatatgaaacggtatttgattttagaagatggcagttcatttccaggtgaaggaattggtgccagtattatttcaaccggtgaattagcaattcaaacggctaattttggctaccaagaagcattaacagatcctactaatgctggtaaaattttagtctttacttcaccaatgattggtaataacggtattaatgccattgattatgaaagtattgatcccgtagttaaagggattattgctaacgatattgcattaaatatttcagatagtgaaaattttgaagatttaagttcttttttgaaagaaaagaacatccctgcaattttcaaagttgacactcgtgctttagttcatcgtctaatggaagaaggtacaattaaggcttcgatcatggatactaatgacgagcatgcctttgatcagattaaagcactagttttacctaaaaataaatctgcgactgtttcaactaagaatgcatatgcatcccctaatgttggacgaactgtagctgtgctagatcttgggctaaagcactcaatgctgcgtgctttatctttacgaaaagtaaatacgacagttttaccatacagtgccagtccgattgatattgaaaacttacgtcctgaaggaataattatttcaaatgggccaggaaaaccagaagaagtaattaatcagctaacgccagttttagatcatttttatggtaagtatccaattttaggaatcggattaggttttttaactttgagcgattatctcggctttgaactggttcaattaccacaagaatttgatggtattaattatccagtgattgaacaaaatggtaatgctatctggcaaacagcgatgaatattgaccaactagtgttgcctgatagtgtaaagatgaatatgaatcgtgaatactttgatctacacagtgaactgatggcgggcttctggaacagtaaggacaaattgatcgccactgcttttaatcctgaaggagcaccaggcactaatgatgcagatgaaatttttgattattttttacagatgatggggtagttatatgccattagaaaacgatttagataaagttttaattatcggatcaggccctactttaatcggtagtgtagcagaaatggatcttatggcaacagaagcaattgatgctttgacagaagaaggcattcaagttgtgctagtcaatcctaatccagctacaatttcaactgataaaaaacctggtgtaacagtctatcttgaaccgatgactctcgacttcctgaaaagaattctacggatggaagagccagatgcaattatgacagcttatggttcaactaatggtttaaaggttgcacataagttattacaagatggcattttagaacaaatgggaattcagttactaacattgaattcgcgtgctctacaaatggggaatcaacagaaaaagacagagttgcttactaagctacatattgataccgggcaatcttgggaacttaatcagagtattcaggataatttagataatgcgctagaaagcattaacgacaaagtcacttttcccgtattagttactaagtacaaccgttttgtacacaacgaacatttgcaatttgcaaatcctaccgatttaatcagttactttaaagaagaaaagcaaaatgataattttacatggaagaattatcgcttaactgaagacttatctagttgggaagaagtaattgttgacgtaatccgtgataaggatggcaatttagcttttatcaattttgcgggatctattgaagctgtaggtattaattcaggtgactctgcagttgtgatgccatcattaaccctaaacaatgatcatattcaagagttaagaataaccgttagaaaaatcatgtctaatcttgatctcattggatttgctagttttcattttgcgattaaacaccatggaactcaaattcgatctaagcttttgacgattcgtccgcgtttgacgcgaagttctgtttgggctcaaagaattggaatgtatgatgtgggatatgtcgttagcaaagttgctatcggttatcgactgaatgagattaccgatcctctatctggacttaatgcctcaattgaacccaccttagatgcagtagcaattaaaatgccatattggtcatttgctgaatccggttataaccactatttgctaggaagtcgcatgcaagcaagtggagaagcaatgggtgtagggcgtaattttgaaactgcttttctgaaaggcttagatgcaactattaatttagaattgggttggcatgcttttataaaagaaaaagaaaaatccactgcagatattttgaatgatttggcacatcctgatgaattgcatttagttaaattattagccgcaattgatcaagatattccatattctgaattacaaaaagtaacacatttgcatccggtttattatcagaaattgcttcacattgtaagacttggcaaaaagttattacaagagaaggagcagccttcgcgtgatttgctgcaagaagctaaagactatggattctttaacccattattagctaagattttacaaaaatcagttactgaagttcgctctttgattaataaaattgacttgcagccatcatatttgaagatcgacggctcagcaggtgtatataaacctaatgtttgtgcttactacagtgcatatgatgttcaaaatgaagcacaagctttaaatgctgaaaaaaagatcttgattttgggcatgttgccgcttcaagtttcggttactagcgagtttgactatatgattgctcacgcggccgatactttacataagtatggctatgttactgtgcttctatcaaataatgacgaatcgatttcatcaaggtataagaatattgaccgagtttattttgattccattacagttgaaaatattctaactgttgctaaaagagaaaatatttctgatgtattagttcaattttctggcaaaagaatcagtgcattgagtaaagagttggaaaaatgtggtttgcacgttattgggcaaaaggcaaacgacgatccgcgggataagattactactttgcttgatcaacaatttactaccttaaagcgggtcccggcattaaataaaacaactgatacagaccaggttttcgcttttgcttctaaatatggttttccacttttaattggtggtatgaataaagaaaacaagcaaaaatctgcagttgtttatgatgttcctgcaatagagaaatatttagcagaaaatcaacttgatcaaataactatttctcgctttattgagggacacaaatatgaggtaacggctatctctgatggtaccaatgtaactttgcccggtataattgaacatctagagcaaacaggttcgcatgcctctgattcaattgcagtgattcagccgcaaaatttaaccgaagagcagcaaaaaaagattgagcaagagtcaattaaattaattaagcagctgaaaacaaaaggtatttttaatctgcactatttattcgttgataatgacctatatctattgcaaattaaaccatatgcaggtcataatgtagcatttttatcaaaatcactagataaggatatcactacttgtgctacagaagctttaattggcaaaaatttagcagagctaggatatcctaatggtctatggcaaaacagcgattttattcatattaaaatgccagtattttcatttcttaattattcaagtggtaatactttcgattcaaatatgaaatcctcaggttctgtaatgggtcgagatactcaactagctaaggctttatacaaaggatatgaagcaagtgatttacatattccaagttatggaacaatctttatttcagtcagagatgaagacaagaatcgcgtgacccaactagctcgccgatttgatcgcttgggtttcaaattaattgcgaccgaaggaacagctaatatgtttgcggaagctggaattactactggagtagtggagaaggttcataaagaccctagaaatctactagataaaattcgtcaacataagatcgtcatggttgttaatattactaatttgtctgatgcagctagcgaagatgcatcgcgcatcagagatgaagcgctgaatacacatattcctgttttctcaagtatcgaaacagcggaattgatttcagacgttctagaatcattggctttaactactcaacctatttaataagcaaaacaaaatgcaaagtcgatatgactttgcatttatgagaatcattgaactaactagttcgatgatttttatttttcaatttttttattcataatttccttttcttcaggagttacttcaattgaattttgtccagtgtagattacaaatcctggtttagcaccattaggctttttcacacgcttgtcttgcacataatcaacttgtacgtgagcggaatttttagccttagaaaagtaagctgcaatctcagccgcttctttaatatcttgatcagtaggctgatcatcgcgtaagatcacatgtgagcctggcatattcttaacatgaaaccagtaatcagatttattagcttttttaagagtaagccaatcgttttgatagttgtttttaccaaccaatacgtgtttaccagataaaagtttaaattcatttaaattgcgttcagtgattttcttcctacgcttatttttcttttgtttacgtaaatatccttgattaatcaattcatctgtaatttgatcaatatcctgtggatccgcattgtcaatagctgtttgaattgaatcaaagtaacgaatattatccttagcaatacgaagctgttcattaatgtgcttaatagaatcacgtaactttttgtaacgagtaaaatacttttgcgcattacgagcaggggagagagcaggatctaatttaatctctaatggagcattattttcgtaatagttaggtaatgaaactttagtcattccaggttttacttgagccaaatttgcatttaaaatttcgcctttaattctatagccctctgaattttcagcaagatctaattgcttctcaagttttttaactttcttagttagtttattttgctcattcttaactacacgttcaacttgtcctgcacgctgcttaacccaatcacgtgttgcctgatattcataaaattcatctaagccagcattcagatctggattagagctttctttctctaaatctaaatgatagggcaaataacaaaaaatcttacgcttatttctaggtgtttttaaaataaaagcacgcggattgtcaaactgattaaaaaaggtcttaaaagatgaataagtgtaatcgtcttcaagatagcctaataattcagttcgatcatctttatctaagccatccattttttgagcaatttcattaggctggttttcactacttaattgtttaaattcactttctgatagagtcaacccatttaatcctggttttagtgggggcaactcatattttgcttttggcagtaaaacacgcgctctattttcatcaggattaattcgcttaagtaaatcaataatgtgattgtcttcttgattataaaggatgacattactatgacgtcccattaattctacagaaagcatgagcttgacttgatcaccaagttcatttcgattactaaaatgaaagttgacaattcgacctaagccaacttgctcaatcgattgcaaaactgaaccttctaagtattttcttaaaaccatgacaaaaataggtgctttatcaggatttgcaatgttttgtttagtcaaatacattcttggatattgtgcattggccgaaattaaaaattgataattctttctatcttttctaaaaattaagactaggtcttgatcaaatggttgataaatttttgataagcgaccacctaccagagtagggactaagtcttttaataaactatggataaataatccatcaaatgccataaatatcacctcaaagttcgtgtaatattatatcaatttttagtcagattctaaaatgattatatttataagttatagctaatcataattgaaacctgcaatacagtagtaaatgtttcacgcgaggtctgctatatcattcagttgtatattacaacataaaaagtgcattgtattatacaatattgctgataagttagccttttggtattatcaaatgccatattaaatgataaaatacaagtatatagtaatctacattggagaaaaaggactatacgaatggatgtattattttttagtacgatcgcagatcaagtgaaaaaagaaataaatcacaaatgtggcttaaatatttcacaaactcgaattttgctattttttgatgaaaacaaaaatcaagcattagcgatggggaagctggcagaagcgcttaatatttcattatcaaccttaagtcgtcaattgcagcaaaagaagactatgagctttattaatatcactagatcggaaaaagattcaagcaagattgtgaatctaagtgaagctggcgtgactaaagctaaagaactaaaaaaaactctgactaagattgagaatttattatttgtctattttgacagagatgctgctaatttatttattaagcaattaaatcaagtcgctgatacttctatgaccctagaaaaaatggaatagggtgcgtgataggtgccttttatgctataatttttctatgctaaattagatatgggaagggttaataaattgaaaattgcattagttactgacagtactagtgtcttaactgatcaagaagttaaaaataatgatattaatgtagttcctattcctgtcatcgtaggtgataaggaatattcagaaggcgttaatatcacttccacccagctttttgagatggagagacaaggtgctgcttttcctaaaacttcacagcccagcatggggcaaatgatagaattatgtaataaattacacggagaaggctatgaagctattatcgctatcactttgtccagtggtatctcaggcttttatcaaaatatggtaaatatggcacataacaatcctgaatataatttatatccatacgattctaagatgacagttagattgcaaggctacttggtgttagctgccgcaagaatgataaaaaatggtatggaaccagaggctatcttaaagaagttagatgagatacgtaagacaattgatgaattctttgtagtagatgatcttaaaaacttaagtcgtggtggccgtttaagcaatgccggtgcttttattgggacaatgcttcaaatcaagcctttgttaacttttaatgatgaaggaaaaatcgttgcttttgataagatcagatcattaaggcgtgctgtttctaaggtagaaaaattaactttagagaagacagcaaatttgccttataaagataagctccgcttgtttgtatttcactcaaatgatttaaagcaagcggagcaaattaagcaatttgttaatgaaaactttccagataagccagttgatgtagctgaatttagtccagtaatcgctacacacttaggagagaaatcaattgcaattgcatggatggttgatattgataagctcgaattaaaataagaacaaatagccatagaccatagtacaaactatggtcttttttgtttaccctttttacgataatagatttgtaattaaaaattacagttgagatactagtgctgaatgttatagtaaaattgcgagactgtaaaatagtttgtgtaaggatgaatgattccttaaatttatttctttaaacattagaaaaaggagttcctttctcgtatgattggtttgaacaaaaaaaacacatacagaaagaagaactccttcatgaatgattttaccaaagattttgctcaagctctattcaatccagacaaaataaatgatttattgcgcaaagagctacaacaggctgttaataacttgttagaagctgaattgactgcctttctgggctatgatccctatgccagaaatggctgaaatactggcaactctagaaatggtgcttatttccgcaaagttgatacgcaatttggcccaattgaagtgcaagtgcctcgggatcgcaacggtcaatttcatcagcacacgctgcctgactacaagcagcactcggatatcttggaaagcatgattatcaagctttactccaagggcgtgaccaccagggaaatagccgatctaattgaaaagatgtatggcagccattacagtccagctcaggtatcaaatatttccaagcagatgattccaaaggttgaggcttaccacaaacgcaagctaagcgacaagtttttctgcgtctatttggatgcgacataccttcctttgcgccgagaaacatttgagcgtgaagcagtctatattgccattggcatcaagcctaatgggcacaaggaggtcattgactactgcattgcgcctagcgagaacattgaagtctggacagagatgcttcaaaacatgaaatcccgaggcttaaagcaagttgagctttttctttctgatggtgttgttggcatgaaaacagccttggccaggacttatcctaaagctcattttcaacgctgtttggttcatgtcatgcgcaatatctgcgctaaagtacgcgtcgacgatcgtgaaaagatcatgaacgaattcaaacaggtgcatcaacagacaaacaaagaagaagccacagctgtcctgcatgacttctataccaaatggggcaaggtttacagccatgttatcagaagcttgaaagacatagaaccagatctgctggtcttttataactatcccaagcagatcagagcttcaatttattcgactaacatgattgaatcatttaacaatgtgatcaagcgcaaagctaagcctaaggcagagtttccaactgaacagtcgcttgatgcttttattggcattcaggcaatgagctacaatgaccgttatttcaatcgaattcataaaggctttggtcaggttcaggacaccttagaatcctactttgattaaataaataattaaaaaatcaatttacgagaaagaactatttacacaaaagatttgacagtttcaaaattgctatagtaggcaatagtaatatggttatcataaaatataggaattaatttaataactgttttactatagtatatattttaatgttctttttatgttacaatcatttttaaatcaaattatagaaattcgaggaaatgcatatgtctgcaagcatacttattaagccattagttacaatcagcgttaaattaaacataaggaaattacatcaaattgaaaaatatcaacaataatcaaaacttaaactttactcaagttaaagatatcttagctcaacaggcaattactattgctgccaaagaacaattaagttccgtccaaccaagtagcaatttacataaagtagaacaactgcttaatgaaacagaagaagccgtgaagattttgaaattacggcagcacattccttttgccagttctgaggatatcgagcatttaattactaaagctgaaaaaggactaatcttaactcctgatgatctagaaaaagtagcagaatttttacgagtaaatcgcctactacaacgctttttagccagacatgagcagctagcaccattactcaatgcatatgtccaagacatgacgctattgccagacattgaagatgctatttatactactattgaacatggtcaagtacgcgatgaggcagatcgtgaactagcaaaaatgtgccgcgacttaaagaaatctgttactgaactcaaaactgcattaaatcattttttgactagtaaacctaatcaaaaaatgattagagacgcaatgatcgttgaaaaagagggctacgctaccattccaattaaagcaaactacaaaaatcaattgtcagggactattgtggctgtttctaatggtggacaaaccgtctactttcaacctgctaaggttgttcgtctaaatcagcaaataaccaatttaaaggcacaaatacgtaatctagaactagcaatcttaggtgctttaactgcaaaaatatacgacgtgaaggatgatattaagcgtaacattgaactaatcactttactagatatgatttttgctaggggaaagtttgcacaaaaatataattgtattaggcctaaaattaatcgtgaaaattctcttgttttacgtgcagtgcggcatcccttgatcattaatcctgttccgttaaccttagaattaacccaagaaaatagtgttctaatgattacaggaccaaatgctggtggtaaaaccgtcgcgcttaaaactactggcttgatgattttaatgaccgaactaggtctgtttttaccaagcgataaaccatgtgatattccattaatggatgacgtttttactttaataggtgatcaccaggacctagataattctctgagtactttttcagccgaaatgaaagatattgccatgattaccaaatatgctcaattccatagtttagtattattagatgaattagggacagggacagatccaaatgaaggaagcgcactcgctattggtattctacaagagttgtatttacgtggctgtttaatcatggccacaacacactacagctctattaaggattttgctaagcagcatgatggttttatcacagctgcaatggattttgacttaaaaaatctgcaacctacttataagttaaagataggaagtattggtaatagtcgagcactatggatcgccaaaaaatcaggtattccagaaaatgttttgcatcaagcagaagccatattagcgggcaataatttacctttatctttaaaaaaacgtttcgttcaccagcggaaaaacaaaagcaacctggttgttaaaaaagaatttcataaaggtgatattgtatatgctaccaatttaaaagaagaaggaatcttttataaatatcttcctacccaaaatgcagcaaagatatttgtgacaaaagaatttgtagaagtaccactcagacgtttacaattaagacgactagctaaagacttgtacccaaaaggatataacttagatttactctttgttaaagactggcaagattataagtttaatcgtgatctagatcgtggctccaaaaaagcttacaagaaattgaaacattaataaaaaacgagtttggaattgaatagccaaactcgtttttgcatttaatttgattaatcgtgatttttttttgagatctcattgagagccgcacgctgttttttctgatcaacatgagtatatagatcggtggctgaagtgcctttttgacctagctgttgtgctacaagcacttgatctttagttacttcatagagctcagaagcaaccgtatgacgtaacttatgtggggtaaggggatgaccaaaagctgcagaatacttattgatcattttttcaattgcattagttgtaattcgccgcgtttgaccatgccattgagttaaaaagaatgccacttgcttactatctgcatgatagcgttcattacgaatacctttatatcgcttgatataaggaagtgtccattctgcaattggtacactatctttttgtccgccttttctagttacatctagtacagcatccttaaggtttaaatcactcaaatcaacgccagcacattcagacacccgaatgccggtacctaagattaatgcagcaattgccatgtcacgttctttgttttgcttaaaaccaatctttgcttgcttattacaatggttaatatagtcctgatcaataaaagtcaaaaattcaaattttaacttaccagtgtacatgtggctttcaagtacatgagcccgataattaagtgtttgcgtatcatttaaagaattaattttaagcattacattccgttcaaaatatggctcaccatgattattgtcggcagtaatggttaaaaacttaaatagggagcgtaaagcattaattgagcgattaatcgtagtgggggagtttagtcggccttgcttattacgggtatgtcctaaataatcaatatacagcattatgtcattgcgacgtaagttggctaatgtatccgtagtaacatgagcattatctgaagcagaagagatattttcttgacgtagccaatcgaagaagcgtcgaatttcagttaagtactggtaagtagtagttaatgaatgattagtaccaagattaaattgcttaacaaaatcaggcaatttatttacttcaatttggatcaattctaggtatttagcagtttccatatctactccttttgcgaactaatgtttatattatatcatacaaatacgttaatcataaaaaaatcacctattctcaggaataggtgataaaaaacagtctaatttaaaattactgcgctcattcgaacgtgaatatctatagtactaacgtagaaaaatgattgcaactaaatttaacttagataatcatgtcactataactagaataccagcaacgcttatagaaaactcttagcattctaattatagcaacagtgattgctcgtcagtaagtaagggcaaattacatttagtaattcaaacattacttacaaacatatgttgtttgtatggtacaacacttttcaatcgtttattttatgctctttattgctaatgttcaagtaaaatataacattttttataaagaatcgaaaaaagcttattttccttgtttagtcgtattttttggctaaaaattgtacaatagatgaaaatacattatgtgagatgaggaaaaagtatgacagaagaaattagtgtaaacttccaagctaaaaaccctagtggtatcaaattactgaatcgtctatatgatggtcacttagtgttaaacgacattggcgttcgtttagatgaacaacttaataatgaagatgaagaattgactgtaccaactcaagcagatgtagataacttgagtgagacttttggtaaaactgtcacagttttcagtgatattgccgatgcatatggggatgtaaataattttgcgaaaaactttggtggtaccactaagatttttgctcaaaagttaattactgaactagtagatttcaataatggtattgcggacattggagattccgaaggcggtttagaaaactacgataacgataagcttaatgactggattaatcaagtaatgagcgacatcgttgaaactaatgaagcatttaatgcattaattgatgataaataataaaaagtgtcagtccttaaaatgaggattgacactttttatagttaattgctttttaaactggacattggataaactgtgtaatcagcacggtaaacaaatagacgatgaccatcaatcacaaattgagttgcattcttcatatcactcttatgaattgagacgtgatttccaataaagacagcaatcggcattcctaattggcttctaatcattactactcttgagctaccattccaatcgtttttaaaattctgatacattgtatttaacagaggaacagaacgattttgatcgtcgatcttaacttttttgttaaatgcatcctcgtagtttttcagtccttcataggcaatcatagtagaaccaacgtgaatcattcgattattgccatagtcaacatcaattacgctagaatgttcagtgccattactacttttctgtgacatctttttatcagtatgaatattaactgacttagctttgatctggtcgatcttttgtccattagaatcatacgttgatactgttaagggcaatgccccaatcttagagcgcatagataattcccagttttgaaaatcactacaaccagtcagagaaagcaataatactcccagacctaagaataaagctaacttctttttaaatttcatccttatcttatcctcgtttctatataatgccttaattttaacatggataaaaaagggatgcagataaataaattggaaatgatttgtcagttcatttacgttttagggatgcatcaaaaaagcagcaaatatttgctgctaaaaataaattagaacttgtctgctttgacgtaagcatttttaccaattcgatagtaagcttcattattgatgtaatgtttagggccataagtcttgatcggtgaaccggattttttagtagaccattttgtattaatggtgccatcatttttatacactttagcatcagctttaaagacgcgtgaattgcctagtacgttacttgccatcacatacttgtcttcaccgacacgaatcattgatttgcctttaattctcaccttattgtcataataagcaatagagctgtaagcattataaaaatcatttgtccggttgctatttttgtcataaacatatgacttgtacataactgtagctgttttcttggtattggaagccttaggagcctgtgaaactgccgcgttacctgcgattgataatggcaagactgtaatattgccatcagtattcattccgcgccaattatctgtgaactgccagattgcgacaccatccattgaagggaagtatttaaagttgggttggtctactcggcctgaaatcgcatatgcggctacccagagtgaattaggatacttgttcacgatagatggagtattaatattgttttgcaaaacggaagaactagcatagagaagtggttgatagccagccgccttaatttgatccataaaggcaataatagccttagctgtcacatttttaccattagtaatgatattgccctgaccagtttcataatcgcaggctaagtatgagccagctggtaatcccaacgccttagcagaagaaattgcgtattgcgcttcgcgcttagcggccgatgaacttgaactaaaagttgcaaaatgataagccatcggcatcatatcattagcaatagcagatttaatctgattggctgccttagggttgcgataactggttccctcactaactttaacgattgcaaattgagaaccagccttggcatgagcagttaaatctgcgctttggtagctggcaacatcaattccaagggctttagcaacaactgatgttgatgaagcttgcacaatgctctctgagtcagagaaacgagtcatttgagataaaagtgtgacacctgcattcgttaacatagttgcacatgctaatttaataattgatttccttttaaacaatttatgtcctccatacttagtggagagaatcttatctatatctctcacataatttatactttatagactacagatatagttctcaaaaggcaatagatgagatcatttattaatatatcagtaatcaaaccgaaaaaaattgaaatcaaattgagatatacaatagacaaaaaataaagaattagtcgtggcaagaaatatgccccaaatctaaagaaaagtataagacagtcaaataatatattttaaaagtgacaagaaatagttcattcgcttaaaataaagaaactgtcaaatcttttgtgtaaatagatctttctcgtaaattgattttttaattatttatttaatcaaagtaggattctaaggtgtcctgaacctgaccaaagcctttatgaattcgattgaaataacggtcattgtagctcattgcctgaatgccaataaaagcatcaagcgactgttcagttggaaactctgccttaggcttagctttgcgcttgatcacattgttaaatgattcaatcatgttagtcgaataaattgaagctctgatctgcttgggatagttataaaagaccagcagatctggttctatgtctttcaagcttctgataacatggctgtaaaccttgccccatttggtatagaagtcatgcaggacagctgtggcttcttctttgtttgtctgttgatgcacctgtttgaattcgttcatgatcttttcacgatcgtcgacgcgtactttagcgcagatattgcgcatgacatgaaccaaacagcgttgaaaatgagctttaggataagtcctggccaaggctgttttcatgccaacaacaccatcagaaagaaaaagctcaacttgctttaagcctcgggatttcatgttttgaagcatatctgtccagacttcaatgttctcgctaggtgcaatgcagtagtcaatgacctccttgtgcccattaggcttgatgccaatggcaatatagactgcttcacgctcaaatgtttctcggcgcaaaggaaggtatgtcgcatccaaatagacgcagaaaaacttgtcgcttagcttgcgtttgtggtaagcctcaacctttggaatcatctgcttggaaatatttgatacctgagctggactgtaatggctgccatacatcttttcaattagatcggctatttccctggtggtcacgcccttggagtaaagcttgataatcatgctttccaagatatccgagtgctgcttgtagtcaggcagcgtgtgctgatgaaattgaccgttgcgatcccgaggcacttgcacttcaattgggccaaattgcgtatcaactttgcggaaataagcaccatttctagagttgccagtattccagccatttctggcatagggatcatagcccagaaaggcagtcaattcagcttctaacaagttattaacagcctgttgtagctctttgcgcaataaatcatttattttgtctggattgaatagagcttgagcaaaatctttggtaaaatcattcatgaaggagttcttctttctgtatgtgttttttgttcaaaccaatcatacgagaaaggaactcctttttctaatgtttaaagaaataaatttaaggaatcattcatccttacacaaactattttacagtctcaaaataaagatagttaaagaaagcgctttgtttaatcagaaatgtgataagatattttgcaagaaagcaaatgtgatcaaaatgctacattggatttgggtattaattgttggtggagtaatcggcttaattgcaggtgctttaactggacatggtaagtcaatgaactggattgctaatattttagcaggattggttggatcttcactaggccaagcccttttaggggaatggggaccgaaggttgcggacatggcaattgtaccgtcaattttaggtgcagttatcttggtaatcgtcgttgccttcattatgaataaaattagacctgcaacagattgagtttattcagatttttattctagctagataagcaaagagcctgattggacgaattatgtctgatttcggctcttttttcgtcttccctggtcagcagaggaggggagatagaggtataataatgaattaaaatgttgcttgtttgtataaagattgagtaaccacgataaattaattcattaaaaagaaatcttagagtgattctcagcattttttgaagattgaaactttatttagatgtcttattcatgtaaaaacacagatttaagtagcgacttgagtcatgagtttagtagaattatcatttttaccgcttgattatttatttaagaaatttcaatatgtgtattattgcagcaaatcttaaaaatagggaataagaataaatataaaagcacttaataccgatttgtatgtagcaaaaagagcaaagaatttataaaatatttttttacgaatttaaaatgaaatacaaaacgttaaaacaataaaaataacaaaagcacaaatttaccaaaattaggcttttgcgagataggtttatctagcgatcattaaaatttttgttttaaagaaagctatagcataaaaataaaaaatggctttatagatactaaaggcaaaactagcaaatattactcaactattttcattgtttttaattagaattactttaccataattgtttcaaaatacttctctttgaaggttgttttattgattattgtcagcatattattcaattcaggaaactgtcaaatcttttgtgtaaatagttctttctcgtaaattgattttttaattatttatttaatcaaagtaggattctaaggtgtcctgaacctgaccaaagcctttatgaattcgattgaaataacggtcattgtagctcattgcctgaatgccaataaaagcatcaagcgactgttcagttggaaactctgccttaggcttagctttgcgcttgatcacattgttaaatgattcaatcatgttagtcgaataaattgaagctctgatctgcttgggatagttataaaagaccagcagatctggttctatgtctttcaagcttctgataacatggctgtaaaccttgccccatttggtatagaagtcatgcaggacagctgtggcttcttctttgtttgtctgttgatgcacctgtttgaattcgttcatgatcttttcacgatcgtcgacgcgtactttagcgcagatattgcgcatgacatgaaccaaacagcgttgaaaatgagctttaggataagtcctggccaaggctgttttcatgccaacaacaccatcagaaagaaaaagctcaacttgctttaagcctcgggatttcatgttttgaagcatctctgtccagacttcaatgttctcgctaggcgcaatgcagtagtcaatgacctccttgtgcccattaggcttgatgccaatggcaatatagactgcttccgcacgctcaaatgtttctcggcgcaaaggaaggtatgtcgcatccaaatagacgcagaaaaacttgtcgcttagcttgcgtttgtggtaagcctcaacctttggaatcatctgcttggaaatatttgatacctgagctggactgtaatggctgccatacatcttttcaattagatcggctatttccctggtggtcacgcccttggagtaaagcttgataatcatgctttccaagatatccgagtgctgcttgtagtcaggcagcgtgtgctgatgaaattgaccgttgcgatcccgaggcacttgcacttcaattgggccaaattgcgtatcaactttgcggaaataagcaccatttctagagttgccagtattccagccatttctggcatagggatcatagcccagaaaggcagtcaattcagcttctaacaagttattaacagcctgttgtagctctttgcgcaataaatcatttattttgtctggattgaatagagcttgagcaaaatctttggtaaaatcattcatgaaggagttcttctttctgtatgtgtttttttgttcaaaccaatcatacgagaaaggaactcctttttctaatgtttaaagaaataaatttaaggaatcattcatccttacacaaaatattttacagtctctgaattcgagttaacaaatccaaaataagacttatttgctgaaacaattaaattaattatgacttctattattaaattgattgtttttcaatctggctttacataatattaattatacgcacacttataaaattattatttttcagattggtcgctttcttctcactcacaacctcttcaaaaaaacacttgccaattatgacaagtgcttttaaaatcattttgaaaaatcaatttttttatttcgtctcaatgcaatgatataaactaaattaatcgtcgttaaaaaaatgactgcaatccaaatagtttttaataccaataatttttgcagtaaagctgaaattattgctccaactgcaaatgcaattgttaacatcatataattaacggcagctgtatgtttacttttgtcttcaccaaaaaaaatgcactccatgcaacaaccgatttttttaaatttccagttgtaaatgcattgttataacccatgccttcaattttgctgaaagatgcgttttgaatagccaatccaaacgcaatagcaggcacaatataataattaggaacacttttaggcaaaaagcccactacaatacaaatcgctaaaattggaaataagcaaaatactctccaatagtgacttttcacatatttatgaaaaagtcctactaatagcaatcctaaagaaaaagcaataaacgtactagctcgattaatcattccaggaacattatgatcagctaatgctgaactaaaaaagataacgtttcctgtttgtccagcggaaagcgtatgtcctctctggatatatgtatatgcatcaataaatcccccacaaaaagttaacgcacacgctaattgtcgtgactctgcaggccgattactatttaaaacctcttttaaactcatcaaatccccaatctatttttatatccttgtatacattataagcttaaaaacttaataattagtatatttttttagcttttatttcatttctattttaacaataaaagtattcaatttaagactatactataaactgtgagactgtaaaatagtttgtgtaaggatgaatgattccttaaatttatttctttaaacattagaaaaaggagttcctttctcgtatgattggtttgaacaaaaaaacacatacagaaagaagaactccttcatgaatgattttaccaaagattttgctcaagctctattcaatccagacaaaataaatgatttattgcgcaaagagctacaacaggctgttaataacttgttagaagctgaattgaccgcctttctgggctatgatccctatgccagaaatggctggaatactggcaactctagaaatggtgcttatttccgcaaagttgatacgcaatttggcccaattgaagtgcaagtgccccgggatcgcaacggtcaatttcatcagcacacgctgcctgactacaagcagcactcggatatcttggaaagcatgattatcaagctttactccaagggcgtgaccaccagggaaatagccgatctaattgaaaagatgtatggcagccattacagtccagctcaggtatcaaatatttccaagcagatgattccaaaggttgaggcttaccacaaacgcaagctaagcgacaagtttttctgcgtctatttggatgcgacataccttcctttgcgccgagaaacatttgagcgtgaagcagtctatattgccattggcatcaagcctaatgggcacaaggaggtcattgactactgcattgcacctagcgagaacattgaagtctggacagatatgcttcaaaacatgaaatcccgaggcttaaagcaagttgagctttttctttctgatggtgttgttggcatgaaaacagccttggccaggacttatcctaaagctcattttcaacgctgtttggttcatgtcatgcgcaatatctgcgctaaagtacgcgtcgacgatcgtgaaaagatcatgaacgaattcaaacaggtgcatcaacagacaaacaaagaagaagccacagctgtcctgcatgacttctataccaaatggggcaaggtttacagccatgttatcagaagcttgaaagacatagaaccagatctgctggtcttttataactatcccaagcagatcagagcttcaatttattcgactaacatgattgaatcatttaacaatgtgatcaagcgcaaagctaagcctaaggcagagtttccaactgaacagtcgcttgatgcttttattggcattcaggcaatgagctacaatgaccgttatttcaatcgaattcataaaggctttggtcaggttcaggacaccttagaatcctactttgattaaataaataattaaaaaatcaatttacgagaaagaactatttacacaaaagatttgacagtttctaaactgtagtgcctaatagcactgattacgctaaaaatgtacatttataaacaaatataatttcttattatttaatataagtgtatgttgagaatattaaaatagtctattcattttttacataattttatataggctataatagactataagttacttgaaaggatcgaatgcttgtgaatattaatttaggagaagaaatttctcgtagaagacgtgaacagaaactaacacaggaagatttggctgagctaagtgatctttctgtaaattttatttcacgtgtggaaaggactaaggaccaaaacattagtattcagaagcttgattctattgccaaagctttgaatactactacacccgatatcattaacaatgcctatcgtgctaaaaaaatcaagcctgaaaaaattcatgataacaatacacccgttttcatgaaaaaagttattaacgaattaagaaaattaccagaacctaaggctgaacgcgtatgtaagtctttgatcacccttctaaaagaaatgaataattaacaaaaacgtgctgtttattccgaaaaaacagcacgtttttgttagtcatcaaactttgatccttggacttggatcgaatcaatagttatatcttctagtggtttatccattttatcttttttcgacttagcaattttatcaactacatccatgcctgtaattacttgtccaaagaccgtatgacgaccgtcaagccatggagttccgccttgcttataagcatgaataatttcctttggatagcctgcgggttccatctgttttatgtaacgcttaggcatattcttgttttgaacgataaaaaattgactaccattagtgttagggcctgaattagccatcgataatgctccgcgaatattaaaaagttctcgtgaaagttcatcttcaaatggatgcccccaaatgctttcaccaccagtgacatttccttcaggatctccaccttgaatcataaaatcgctaattacgcggtgaaaaatagtaccatcataatagcctttttgagctaaacgaataaaattttcaaccgtcattggggcttgttctggaaaaagttgaatttttatttcaccttgattggttttcaatacagctgttggtccctgttgattttctaaatttaattgtgggtatttcaatatttttctcctaaaatcagttttaatttttaggtaaaaaataagaggcggttaaccctacctcctattttttacatcattacttttaagcattaaaagcatcagtaagaggtggaacaacctgcttcttacgtgatactacaccaggtaattcaacttctgaatcactaagttgcttattaaatgctttttcgaataatgacttagtctcatcagagccaacaactaaagcttctgaatctgagtcaagaatgttagtaattaaaagcataaacatatcatagccattatccttagatgaagcatccattgcctttaaaaaggcttccttacgttctaacgcttcaggtaagtcaacaacattgatttgtgcaacacggacgttgtgaccatttaattcaaagctcttggcatctaaatcaatcaattcttcttctgacttgtcactgatgttagtaccagccttaagcattgctaagccgtattccttgtaatctacgccagcaatcttagccaatgcttctacagcctttttatccttatctgtagtagttggtgatttaagaagtaaagtatctgaaataatagctgaaagcattaaaccagcgtagttttctggaatttcaatgccaaattcattgaacattctccaaacaatggttgaagtacagcctacaggttctgcacggtaatataatggatcagcggtattaaaattcattattctatggtgatccacaacatgagtaaccttaactttgtcaatatctgaaacactttgttgtggttcattgtggtcaaccaacataacagatttaacttctggagcagcttctttaattacacgaggcgctttaaagccgaattttttaagagcatatgcagtttcatcattaggctcacccaaggcaacggcttcagtgttgtaacctaacttgttttgcaaatatgaaaatgcaatagcagtgccaattgcatcagtatctggattttggtgtccaaaaacaaattctttttccattaaataaattgcctctttttctaattattttatttaatttcttcacttaatagtttactaaaattatggttcctatccaagttattgtctaagaaaatctgtaattccgttagtaatttcttcatcctaggaacatctaattttcctctacgataaacacaagcagtcgtaaactcaggcatatttttaatataaacaggagtcaaattaatctcatccttatgcgcctcatagtaagtctgatctacataagtatcaagatcagtattttctgcaattttgatcatttccttagtagatgcaattttaaacggagtaacgagatcaatctttttactaaagttaagtcgcattaatcttgataagtagtaattctccggatatgcaacccactttctgttgccaaaacgagtaacagaatatgtccctcctgcttccacattatccttgtgagtcagtacaacaatatgctcagggcaaatatcacgatgattgtattgatgacggaaattagctcctgttttattagtagtatctggcatatacataatcgccatatcaatcatattggaatcaagtctgtgccatagctctttgcggtcaaagtaatcaacagtaaaagttacttctggatactttttattgaagtaacgtaaaaattggtagaaaagatcaacatgtacggactctagaataccaattgaaatattgcctttatctgactgggtatattcttgaatgtcactaataacaccattaatggtatttagcaactctatcgctgctgcttccatttctttaccagcttcggttaggtataacttcttccccatttgtccaaataatggagcaccaatagcgcgttccaatttttttacttgctgagttaaagccggttgggtaatacctaaaatttgtgcagcttgggtataattcatcgtctcaatcaattgtaaaaaataacgcaatgatttagccgataaaatagtatcacttttagacataacgattatctctttcctaaaatattattttacgataagccatgtcccataacactgctattatctatccaaaacaaaacagtgtcaaaacatatgtcttaacactgtttttaaagattaatatattgttttagttaaactcaaatcttaattttgactactaatgggtcttcccaattcaatacttacaggcgtcccatcaacagtagtatcaataacaaatgagccgttagaataacgatcgcctaatggataatccgtagttttaatatttacatgacggtcactagaagtagtgacatgtaacaaatgatcttgagcatatggcattagagcaacaattctatgcggtttattcttcaattcccgcagtactagtacccctcgcttggctctagaaactttattaactagtttaagtttgaattgcttaaatgccccacgttgagtaattagcccaacatgcattaaatcaacatacttagaatcaactaggacataatttacgatataatcgtcatctttcaagttagcagatttaacacctactgctttagctcctgaagttggtatctcgctaacatcatatctaattgcataggcgcgatgagtaaataatgtgatttccttatgattatctgatttgatcaaatctaccccaactacataactatccttgccctttaacttgatagctgtcattgcacgtgacttataagttctcgtcggctgtaagttagctaactccaattgtttgatataaccgtcattagtagccagaataaagttgcaatcagtattcaatttatcaaatacaaagacgcgaataatttgctcatcactgtctaatccaatttcttgtgataggtgttgtcctgtttctttccatttggtttcaattagttcatgtactggacgataaatgacattccccttattggtaaataaatacaagttagtcagggtagatagtgtgttttcataaactactttgtcaccatctggtaaaccattgtcatcatcattagttgactgatatgaacgtaaagatgaacgctttaaatagccatctcgactaattagtactctaacctgttcatcagcaactaaggctttttcatcaatttcaactttagcactttcttctgaaatttgagttcgacgtggattagcaaattctttcttgactgcatttaactctttaataatttctttttctaaagttgcacgatctgataataatttacggtatttttcggccaatttatttaacttgtcttgttcagcaattaattcattaacatccgtattagttaaacgataaagttgtaaagaaacaattgcttcagcttgtttttcagtaaatttattatacttagctattaaattcttcttagcatcggctttatttttagaagcgcggatggttttaattacttgatccaaaatatccatggcatgaatcaagccctgaataatctctaatctagcttctgccttatctaagtcaaatttcgtacgtttagttacaacgtcttcttcatgttctaaataagaagctaaaattcgttttagcccaacttgaacaggagtcatgtgatcaatagcgaccatgttgaagttataagatacttgtaagtcagtatttttaaataaataatttaaaatattctgcgcatcagcatcttttttcaattcaatcacaattgacaaaccatggcggtcagtttcatcacgaacttctgcgattccatcaatttctttattcagacggatttcatctatcttttttactaatagtgctttgttaacatcgaatggaatttccgtagcaacaatttcttgcctatgcccacgaatttcttgaatagtggttttggcacggacttgaattctaccacgtcctgtcttatatgcttccttaattcccttagtccccataacaatagcaccagttggaaagtcagggccttttacatatttcatcaaatcttcaagagaagcatcaggatgtttcaataaataaattgttgcatcaatcacttcacctaagttatgtggtggaatctctgtagcgtaaccagatgagatcccagttgatccattaactaataagttaggaaagcgtgcaggtaagactgtaggttcatactcagtatcgtcaaagttaagcaccatgtttacggtttgcttatcaatatcttgcaaaagcatattagagattttgcttaagcgggattccgtataacgcatagctgctgggccatcaccatccattgaaccattgttaccatgcatttcaactaacggttcgcgcatcttccagtcttgtgataagtgcactaaagccccatagattgagctgtcaccgtgagggtgaaagttacccatgatattaccgacagccttagcagcctttttaaatggtttatcataagtattactatcttgatacattgcataaaggatacgccgctgaactggctttaagccatctcgaatatcaggcaaagcacgttcttgaataatatattttgaatatcgtccaaaacgttcacccattacttgttcaagtggcatttctcgaattcgttcttttgtggccattaaatttaaaaccttcttttattcatcttcggattctagaattgagccgtcttcgcccattctgaatttaacattttcttcaatccactttcttcttgcggctactttatcacccattaaggtagtaactcgtctctcagcaagagcagcatcgtcaattttaactctgattaacattctcgattgaggatccatagtagtagcccatagctgttccgcgttcatttcacctaaacctttgaatcgctgcagcgaatagccacgtcccattttcttttcatcatcagctagttcttcatcagtccatgcatattgaacttgcgtctttttgcctcgacctttttgtaagcgataaagcggtggcagagcaatataaacttttccgtgttcaatcatcggccgcatataacgataaaagaatgttaatagcaagatctgaatgtgagcaccatcatcgtcggcgtcagtcatgataatgactttatcataattagagtcatcaacattaaactcggttcctacaccagcaccaatggtataaatcatggtattaatttcttcgtttttaaagatatcctgcaattttgccttttgagtatttaatactttaccacgaagaggcaaaattgcttgaaatcttctgtctctaccttgcttagcagatccaccagctgaatcaccttcgaccaagaatagttcattctttttaggatttcgcgattgagctggcgttaatttaccagacaaaacttctttttttcgtctctttttaccattcctgctttcatcacgtgcctttttagcagcttcacgtgcatccctagccctttgagccttcttaactagttcctgagccagctcaccattttccattaaatagtaagacattttctcataaacaagtgaatctacagcagaacgtgcttgtggagtacctaatttacccttagtctgtccttcaaattcaagtaattcttcagggattttaacagataaaaccgcgctaagcccttcacgataatcagaaccatcaatatttttatcttttttacctagtagaccctgctttttagcataatcgttaaatgcacgtgtaaatccactacgagcacctgactcatgggtaccaccatcaccagttctaacattgttaacaaatgaaactaaattttctgaatatccatcactatattgacctgaaaattcaatttccatgccatcttgcttgccttcaaaataaaagacatcactaattgtgcctttaccttcgtttaaatacttaacaaatgatttaattccatcatcatactgaaaaacatcatgatgttctggctcacgctcatctgttaagaaaaatttaacccctttaagtagaaaagcatattcacgaattctctcctgaattgtctcatacttatacttcgtggttgaaaagatagtctcatctggcttaaacgtaatggtagtccctgttggctcttttgtctttcctacacactttaatgtacctaccggatgcccaccatctttaaattcttcttcataagctttaccatcgcgaacgactctaaccttcatataacttgaaagtgcattaacaacggatgaacctacgccatgcaacccgcctgaagttttataattttgttcagtaaacttaccaccagcatgtaatacagttaaaataacttcaattgtgggcttacccgatttgtgcattcctgtcggcataccacgcccaaagtctcttacagtaacactattatctgaatgaatgattacatcaatttctttaccaaaaccagccatggcttcgtcgacagagttatcgacgatttcatacactaattgattaagaccatgaatatcagttgaaccaatatacataccaggtcttttacgaacggcttctaggccatgtaaaatttgaattgaagaatcatcataagtattagcttttgccactaaaattcctccacttgttcattaatttaaccagcaccatatatttaaaagataatctttgctaaaatagcgatagattaataggagtgttgttaaatatgtttgcattaaaatttgcatcgttgtttattttagcatacttgattggatcattcccaacaggtgtgttagtgggtaatatcttttttcataaagatattaggaaatacggatctggaaatatcggaacgactaatacctttagagtattaggaccagctgctggaatcattgtctttatagtagattttctcaaaggaacttttgctacagtattaccaataatttttaaactaggaccacattatctttgcttgatttttggcttagctgcaattttaggccacgcttttcctgtctttttaaagttcaaaggaggcaaggcagtagcaacttccgctggatttttactaggatataatgtccattttttcttgatctgtgcgttaatcttcttccctatcttatttattacaagtatggtttcattaactagtttgatctcagtagttctaatctttattgcttcattctttttccacgatcttgccttgagcattatcagtggattgctcgtaatcttaatttactggagtcaccgaagcaatattattcgaatcgaacatcaccaagagaatctggttccattcggtctagtgtattggtataaaaagaaacatactaactcaaactaaaattataaaaccagcaagcatttagcttgttggtttttgtttacctaaatattatacttttgcaaacaatagttcgcaagtacaaacaaatatttttattttattataatgatctatttatttcaaaatcttaattaaatcgtctttactcattgttgcatcagcaatctgatcattttgcaaaattatatcagctaattctgctttcttttgctgtaaagcaatgattctctcttcaatactgtcttctgtaaccatcttataaatcttaacagaatgcttttgaccaattctatgagctcgatccgtcgcctgtttttctgcagccaagttccaccaaggatcataatgaattacaacatcagcaccagtcaagttaatgcctgttccgcctgcttttaatgaaatcaaaaagacccctggttgagccatttgattaaacttttgaacttgttcttgacgcttagttttaggtgttgatccagtaatagtaaataaaggtagtcttaatctggcaaggttttcatgcaaaatatctagcatagctgtgaactgtgaaaacaataaaattttatgtccatttgctagattattcttaatcaactcaattgtagcaattaatttattagacttgccgtgatagttttcataaagcaaatgaggatcacaacaaatttcacgtaatttagtaatctgagccaaaatttgaaaacgtgatctcttaaagtcttcatccccctgtccatttaattgagcgataatcttttgcgtctgcatattatacaaatcagcttgtttcttattcattttaacaggcacaatttcttcatctttgtcaggtaagtcacgtagcacatctttttttagacgccgcaagataaagggtattatcatattagctaattgatcttctgcttctttatcttgctctttaacaatcggtaattcatactttttcctaaagtcaggatataaacctaaaaaacctggcattaagtaatcaaaaatactccataactcgctcaatttattttcaatcggtgttcctgttagagccagtttatgatgcgctttaatgactttgactgtcttggcggtaactgattgctgattcttaatattttgtgcttcatcaattacttctacatcaaaaattagattttggtacgcttctagatctcgattaagcgattgatatgaactgattagcagattatactttttagcatctaaaagcaatctctctcgttcttttttagtgccatctaatagagccacattaaggctaggtgcgaactttttaacttctgcctgccaattatagataacagaagcaggcgcaacgattaagctaggtaactgattttgcattttttctttgcgagctaaaagaagactaataatctgcaaggttttacctaatcccatctcatcagcaagtagcccgccaaatttataattaacgatagtgcttagccaattaaaacctatcttctgatatggacgcaaaatattttgcaaactaactggtatttgattttgcttcaactgattcttagctaaatcattaatcagagtattaaaggattcattagttgagaaatgcagtgcattagcagctttcatttgcttagcaaaataaaaggcacgatatgctggtaaatgtaatttaccgtgaatgaaatccttaaaactaatacctaaatcatgcaaagtttgtgccaattgttcaattgtcggttgttctgccttagctagcattccattttttaaaacaaaatattttcgcttttcttggtaggctttcaaagccgcttgaatgtcttcccagctcatcttttgatcagcaagatcgatatctaataattcattagtcaggttgatacctactccaacatccaaattaatctttattccctttaaaagtgatctaaagttagctgtaatttgtacttcgcctaatcgtttcaactcattgataccatcatctagaaaagcttgtacgacatccgagtcttcattggataaaacataccgcccatgctgataatcactaaaatatgtattaatgtgcttccatgctgcggtctctttttcaacatcgcgtcggtcctcttcagtatatccttgatttaactcgtattgtgcatccccatactgtactcgagccacacataaaatactgcctacacgataatctaatttaaacaaaaaatgggcctctggtggcaaaatagctttcaattcatcagtaccagacactaatataaactttgtttgctcaaatttaggcaaaatattatgtgcaaacttagcaacggtctttttactaaattgcatttcagcaccaggctgcaatcctaaattatgcaaagaagcaggcgtaagacctatatatttgatccatacatctttgtaatagccataatacgcatgactcccagtaattatagtagaaactggaagatcctctacactaactaaagcagatgacttttgagtttcaattttaatgtttaaatctagttgatcagttgtatatcctataggctgctcatttgagtacaactttacgccttgataaagtaaatcattaacttcatcggccacagagttctctagtgtaatgcgaccaacctgactactgtaattataataaaattcttcgtttagattacgagcatctataattttttcaataaaagataaccagtgttgactatcaatatccattttagcctgatttataggctcgttgaaaaacttacctagctttagagaagagctgtgtcgggatgcatctactagttgattaagatctttaactttataaagatgcttgttctttcctaatttaaacgtcaaactagggatgttattatacttatcaatacttgcccgcaaaataatcggctcatcattttgggtagaagcgtcactataaaattcaagtagatcttcagcggcctggttagttaaatcaaatggatcgtcatcaagatactcattaataaagtaaaacagagctaatattctaacactatctttttcaatacgggaaaaatcactatcaaatttaattgatataatttgccagcgagtaaattgcacagataatgtaattaactcattgtcctctgttactatctcccaaaaatattcatatttacgcatcttatcatcaaaatgccgacaactactaatcgaccagtgatcattaagttccagtgcctgatcataactttttttggtaaatttcatattgccaatcaaatttaaggggttaagtactgggcttttatgtgcaatcatttgcttaagatgttcagaaattaagtcagcaaaagggactttaacgttatgttcattttcttgttcgttttctactgcaagtaaagccgcaacctcgtgtttacagcgatgccctttattagcccatggacaattacagtctaactctgaagctcgaccatctaaacgaagacgaccagttacagtataagaacgacccattccgccttgaacttgagcggtaaagtgttcctgatcttgagctaattgaatattttcaaccatatcattgccataatatatttctccacgatcaaaaactcgttcaggaaataatctatgccatctagacatttacatcacgctctttcataattattactacttacactatcataattttttagttgttaataataaattgtcacaacatttttagtgagcattttattattaacaaatcatgcgatgatcttataataaaagtatagaaagtacagtattatcatatagacttatataagtatcagctaatgtaaataaaatacagaaaggaaataaaaatgactcggcaattaaaattgctgaagacttagattgctatacagaactactttctggaattacaagaaaatttcagcagtttagttatcgtaagctttatttatatgatattcaaaaaacaattcgtattttaaaaatctaccaggaatggcttttagctcaatcagatcaaaactttagcaagctttatgataaattttgggcacaatgtgaaatggatattacagccgtctctctactgcttgtgccaaacgtacatgataagaagcaggaaatagaacgcatagatcatttactcaatcaaattaatcaaattgggacatcatatttactaaatgacgttcaaagtaacgctgtaggttccgccatgaacaatgctatttatccggctaaccgagctggctagagcaaatttatcaaaatagtcaaagtgaaaataatattgaatacaatcataaactgcaaaatttcttaagtgttcattcagagccttatcctgatgcggatacattagttattttctttactaatactaaataaaagacattggccgtatttaccaatgtcttttatcatttttcgttttcattaattcttaaaggatataacctatcatcatgttctgcaggagcatcttcttcgagtaacaaatcatgattaaccaattctttctttagtcgtttcaccgtataagaattgcaatgcatgtcatccattagctcttgattagaataaataatatacatattaccgtcagcatctacccatccattggtttgtgaatcaatcattctcatcgtaagtatcatgtataggtatcatgcatcggggcttaacttcttatacttgggattatgaaaaaatgcttgtggtagcccattttgctgttccgggtagtttccgccctttttaaatttacgaatatttgtatacattttgacctcttcactttacatagctttttcctttacattaattataatgtatatttttattagatagtaataattggacttactagtaaattatgcaggccattaaattaatcagcaatattcgcacctaatgcatttttaaagtgagccattgcccattcatcgccatttgatgtaaaagtagcaacagcagaacgtggaattgtaatttcatagtctaaattatatgccgcaatcgctgtgtgcaatacacaaatatcagtacaaacaccagttagtgtcaggtcatgaatatggcgttcacgtaaataattatctagattagtattttgaaaagctgaataacgatttttatccattaataaaacatgatcattatctttgttttctaaataccatttacccgtttgaccatatacttcacggccagcagttccaataatattatgcggtggatataatttagtttcagggtgatatggatcattttttaagtgcgcgtccatcgggaaaatcacccaatctttattttgtagaaactgtttacacagttctgtaatacgttgatcaattgcttgagcaggctggccacaagtaagagctccatcatcagctacaaagtctttactatagtcgataactaataacgcttttgccattattttctcctttataaaataatatttaaaatatacataattaaattaattattgctaaaatcactattgatataatgaataccaaataaatccagacagtaatattaactaaaaacggtaataatgcagcgtgaaagcctagaaaagaaactaagagaagcataataaaggttataccaattaatcctaaaaaagcatatttgccactacttatatcagcctcgcttaaatcgaatccaccaaaacatagactgattactagcaataaagcaacaattgagtgccatattgaatcaaaattaagctgaaataattcaaaaatataaatccaactatgagttaagaaattccagttaagtgcattaccattacttaataactgagtagtaagctgattctgaaccaatgaaataggtgtattcaatgtacgcatgattatgtaaatcagcaaggtgcatcctaatacaggtgcaatgccaataaaagcattacccaccttttgataagtagatgtaggagaccaagtatgtttaacatagccaagtgacatatcattggtattactagggatgcgcaataaactaaccgcattaatatgatgaccaaaaattatagccataatcaaatgactaagttcatgaacaataattcctaatccgccaacaataatttgactattaaaaccaaatgtatttaccaatttttggttagcttcatggcttaattgtcgtaatgctaatacaaataaagccggaacgagtaacattaaaaaagtcccattaagggcataaagaatatgtttcatctctgatttaaatttgttttacatattgagtcaataatgttaatgccgcaaaaagctgatcaattacgccatcagttgcactgaaatcagttttaacaaactgaataacccaattatttttaattggaattaaacgaacaacttcatcttgaccataattaagccgtaaactattggctaaaatcacttcacgataacgatgtccatcacttcctagccactgtgttgtttgatcagtactttgcttaattaggctataagctttggatatttttcgcaacttattacgcagatcaaaccaggactttatttctactaactcactatttttaacatattcagataattgcatgccttcttgactttgcgcaattctttctaatgtagttaaggcaatcgccatagatttgagcgaatcaattgaaagttgcggcattaaaatttggattagccaattgtgactgaattcatcaggtggatacagtcgactaacttcaagattattttcaaaaaatacacgatatgtattcttacttaggctttcatattctttttcaccatcttgagtgcaatacgtcaaaatgacattatgtttaatttttcgaatggcaaaattatcgtctgatgaaaaaattgtactttcaaattctgtaaaatctgtcattaaattctatctttcgtctataattttatttatcgtgtttactaaaatatattgctctacgcttttttaaactagcaataaccttatcaatgtcttcatcagacattcccctgcgtttggcattgtttcgccattgtaattcactgattggagcacaactaacagtattcaaattcatccatatccagagcgataacaaactacctgcaagacctactagcacaaatgtaccagtaataaaagttaaagatcctacgaaatgtgatacgctccaaagccaaccgaacaaggttatgatatataaaataggcaaaatagctggacgatgattttttccatattcagcattcgggccaaagaaagtttgccaataacgaggtattgagcgattaattactaaatttgctaatgctaatagtaagcaaattagtacagaaacattagacttaattaataaaatactaatagctgacagaatgattacataaaatgtagcaaaattagtagaaaagaaaacccaacgtcgaaatttagcaccattgccaatgattattgcttgcttaggatttaatgttgtctggaaaaacattttatcagttgagacagtttttcgattaaagatatcaaagtgcatctaattctccttacaagcttaattttactacatttctagctatgacttaaatttcaaaaataaaagcggcttacatctcgtaagtcacttccgttaactaattttcaaaccaattccaatcatcgccaaccacgtcaactttagcatcatcggcagctgctgatctgattttttctgcttgagttgggcgttcaattgtgaagccattgttagaatctttttcaaccatgccttcaaattcaactacatcgcccctcttcaaatcaaggtctttgaaagttttcaagtaatgcagtgctaactgcttaacaattggattgccaccagcacctgcaatacgcaaatccttaaaaatagctaagcgatcgtttaatctatcaaaagtaccactaaatttatgacgcttaccatcgtcgtatggttcaagtttttcattgtaaatatctacagacatatgtacataatcttctttctacctctctaatataacattgattttgataaaataaagaggctagataaataaaaatcactctttaatccgattttaacgtatacttttaactgtaacttaggagagaaaatgagcatttattatcaatttggaattattataggtttggttctgttggctttcgccattcacatcgcaatgaaacaacataaaactacctttccattcaacattgtcaacttaggcattgcattcataatctcaacattagcaatttatattattgtagcctgtctaggagcaattcaaccgcaaaactggtacaccaataatgcattatggaaatttttaatagctagttaatcataattgagaaaatctaaaaaagattttctcttttttattaaaatacaattttatttttttattaattgattaatcgagactgtaaaatagtttgtgtaaggatgaatgattccttaaatttatttctttaaacattagaaaaaggagttcctttctcgtatgattggtttgaacaaaaaaacacatacagaaagaagaactccttcatgaatgattttaccaaagattttgctcaagctctattcaatccagacaaaataaatgatttattgcgcaaagagctacaacaggctgttaataacttgttagaagctgaattgactgcctttctgggctatgatccctatgccagaaatggctggaatactggcaactctagaaatggtgcttatttccgcaaagttgatacgcaatttggcccaattgaagtgcaagtgcctcgggatcgcaacggtcaatttcatcagcacacgctgcctggctacaagcagcactcggatatcttggaaagcatgattatcaagctttactccaagggcgtgaccaccagggaaatagccgatctaattgaaaagatgtatggcagccattacagtccagctcaggtatcaaatatttccaagcagatgattccaaaggttgaggcttaccacaaacgcaagctaagcgacaagtttttctgcgtctatttggatgcgacataccttcctttgcgccgagaaacatttgagcgtgaagcagtctatattgccattggcatcaagcctaatgggcacaaggaggtcattgactactgcattgcacctagcgagaacattgaagtctggacagatatgcttcaaaacatgaaatcccgaggcttaaagcaagttgagctttttctttctgatggtgttgttggcatgaaaacagccttggccaggacttatcctaaagctcattttcaacgctgtttggttcatgtcatgcgcaatatctgcgctaaagtacgcgtcgacgatcgtgaaaagatcatgaacgaattcaaacaggtgcatcaacagacaaacaaagaagaagccacagctgtcctgcatgacttctataccaaatggggcaaggtttacagccatgttatcagaagcttgaaagacatagaaccagatctgctggtcttttataactatcccaagcagatcagagcttcaatttattcgactaacatgattgaatcatttaacaatgtgatcaagcgcaaagctaagcctaaggcagagtttccaactgaacagtcgcttgatgcttttattggcattcaggcaatgagctacaatgaccgttatttcaatcgaattcataaaggctttggtcaggttcaggacaccttagaatcctactttgattaaataaataattaaaaaatcaatttacgagaaagaactatttacacaaaagatttgacagtttctataattttcacaatcttagtcattaaaaataacattattcagtttaaaaacctgaagtatatggactttttgataaaagctattatctatgcttgactttacttcacaaagataagacaatgactgtgcagtatatgaaagcggatacaatataaatggtatatctatttttgaaagcatggggaaaataatggatagtttattatttacaacatatgaccaaaataaaattaatgaattacaagataaacttaaccagcttagtcttcctatcaaagtagttggtttagctgaagtagattatgcaccacaaaagtcatattctgaggcaacatttttaagtaatgctagagctacagcacatcgtttagctgaatttaccaatttgcctacattatcagaaagctcaggtctaagtgttgattatctacttaactctttaggaatcttgccttaccaccataatggtcaagatgataaagctaaattattaggctatttaggtggagtttctagtgaaaaaaggacagctagctactacactacctttgtctttacttggccaggtcaagaaagcaatgatattgttagtgctggtagaatcagtggattaattgctaagtatccacatggtagcagtaactatggttacgatgctttattcgtagttccagaactaggaaaaacctttgcagaaatgaatctcaatgagagaaactcaatttcgcaccgcaataatacattaaataagttattgtgtgatttacccgattggtgggatgctcaaaaatctgctcaggcaattaataactagctcactttgaaaattaaactggttaaataatatctacttacttaattcaataacttcttaatactaataaataaatcctaaaaaaggtaggtcaaaattgacctacctttttgtttaagctttacataattaaaaatatttttataaatcttgatccgtcttggtcaaatcactacgatctgaaatccaaacatatagcggcaaattaatcttacctttttcatcgattgcatcaacgactttttcaatcaaaaattcttgccatttctctgcaggttgcatccctgggtgacccaattgtggtaccaaccatccatttgctaatggcttacctgtagtcaaatctacaatcatgccgacagtataattataaaaatcaaaactaccttcaactacaatccaattactactattcatcaattcagattgcagcttagttaacatttccggcggaatctttccttctgtaaccatcattctgcccttaattggaccatttttcttttcgaagtcttgcaaaacacctttcataaaaagcttttgccctaattgatcaaattttgtttcatcttttaacataatcatgtccgctttctttagaatcagtatccattatactaaaatttgtttagtatcgtatcttcacttgtaaattagagtgatcacttgtgtcgtacagcgtctttagatataaccgatactcaggatggtgcttaatcaaaacttgatattctttagaagcatggattttattcaactcgctagcctttatatgattatgaccattaaagaaatgatagttcatccagccaaacaaattccccatcgccctaactaactcgatgtcttcgtgatactgatttaattcactttgcatcatatccgcagaaatactaccaagctgtagatcttttaaatacttatgataatgaactaaagtataattttccttttcctcatccgttaaatatcttgtcatatcaaaattacgccgcacatatgtaatgtgccgtgaatgaactcgcactactccatagccttgatcattagaacaaaaacttgatgtaacgatctcagttgtaggcgtcatgtcttgtggtcccataatattttgagcatgaatatgaccagaaaaagctaatttcacgttgtaacgcgcacacaaacgtcgtagctcaacagcgtcatcaactacatagcccttgttaactgctggattatgtgcatataaattatgatgcataaataaaaccggacgtaactgatgttcctgcgcataacgaaattgtttttcaatccattttaattgtacttttccaatttcgccgtgagtgtgcggtgcttctgttgtctcttcttttccataaatatttgaatccgctaaaactaaaagatattgcggattcagttggacactgtaagccaatgaattatcgtcttcatctaaggcctcacgatatgatttatcaaagatcgagcgccaaaacattgggctaatttcaccagcatagaactgttttttaccacgaaattctctagcccacccatcaaaaatgtcgtgatttccaggtaaaactaacactttagtttctttcaacggcttaaaaatttgagcaaatttctcagcagaaactcgttcaccgttaaatgtcacatcaccagttacaataattgcggcaggcttttttctttgtgccattcgcataaaagcagaaagggctatttcttgataatacaaatccttaccttgactagttttttgcatgcgtgaaaaggcttgtccttcatcatgtaaactatctgcgattaggtgcgtatctgagatcacccaaaattctgtgttaagctcttttgtaatcatttcttaccttctgttagcccaatactgatagaaatcaacccgcaaatttccgttaaatagtttgcgcttcttagtagcctttgcaccaaaacatttttcaaagttaggatctgcagttaagtaatactgactgaacgaactaagcggtctaagtacttctcccatttggcgatacagctcttctgccgactcacgatccttcaatcgcttaccataaggtgggttcgcaattataattccattttctagatcagtagtaaagtctttaactgcgatttgtttaaagcgaatatcttgcaatacacctgcattgtgagcatttaatttagctacttcaagaacagactgatcaatatcactagcccaaatcggtgcttcaagcggcttaacttcactcttagcctttgccaatacttcattatgtagtttagggttaaaccagtcaaaaccatcaaaggaaaatttacgccaggttcctggtgctatatttttagcaattaatgctgcctcaatagctaaagttcctgaaccagtcataggatcaattaaggggtgagtaccattatatggagttagttttaatagcccggccgcaaagttttctttcataggggctccaccatgctctactcgatagccacgtttaaacaaactagcgcctgtagtatctagcgaaattcgagctacatttttataaatatgaatatctaagggatattcattaccagtttctggcaaaaagccacgacgatggtactggtcaaccatcttattaacaattgccttttttacaattgactgtacatctggttcagagtgcaatttggattttacagctctaccttgaacaggaaacttagcgtcaacaggcaataattcggcccaatcaaaatcataaatctcattaaataaggtatcaaaatctgttgctctaaactcttttagcaaaattttaattcggtcagctgttctcagccaaagattagttctaactatatcttcttgaccacccttaaaaaagacacgaccattttcaacacgggtcttataccccatagactgtaattctttattaacgacactttcaaaaccagcgcccatagttgcgtaaagttggtattctttcattgttactctttcattttcaaaataaaaaagagctggacctaaaagcccaactctgcctgtgtgaatttctataagccacgttttgttccaataatctctggcaaagattaccttcagtagtcatctatctttactgcttaaagcaataatccgacctttagttcatttccttaggccgaaactcccccaccaaatttgggtttcacactcgcagggtttacctcgttccaccaaagtcatttctgaccttgcttcgtcactgtggcacttttcaggatagtaatgcatgtccgaagatttagcactttttccgccgtgaagactaacgtcctcctccagcttgttaggctgaatacgatcactacaaacatcgcagtctgtgtgtgcgtggactttcctcagctaacataagctagccgcgcctactcaaaattcacactgttagtcattatagcaaaaattaatgctttaatccataaacgtgttgttctagattataaacttttctttccaaagttgaaatccgttgaataatagccatattagtcgaaatttcaccttgagtatcatctgcatcttctgcaaacttcacaggcgcacttcttctatgcgttggcatataagtcttaaccttttcttcttcagcctcaactgttttctttgctttttgcttttcatccattaattgacgttggagcgtaccgatctgaccatacaaatcttcgataatttgttgaaaagtagtataatcagaaattacttcatctaagtatgcatcaacttcatcgggatcatatccctttactttacttttgaattgtttctttaatatatcttgtcctgataattttatatcatttaaatttgccatcttactgacaactcctttacattccaccctattttagcaaaaacaacgctgactgaaaataaagaaacagactttaataaaatttttaccatattattcagaaaaatgatttatttgatgattttcttggtattcttcagctgcatcttgtaaatcataaaaatcaattaaatctaatggatattctttagtttcctggtatttttggattaaattataatcatatttaggtttacctgggtgctctgaatcatagatcatcaatgctcgatcagtatgctgaatcataaaattttgataattacgtaattgaagtggactttgataaggggtattagaagttgaagcaaaaaagtccactttttccttcaaatttaagaatttagctttgttactatcattccatcgattagcaaattcttcatatggaatcattattgatgttcttaccggatatttttctcctaattcaagtccaacctcagctgtccactgttcgacaccgaggttagctccagtaataatccagtccaattgcccatcatccagtagacttgtcagataattttttagggcatatttaatgacagttatcttgggatcacgatcgccaaaaacatttaattcatagctgcgatagccagtcacccataaacgctgcatttgtttaagcccccctttatgttcaaaaatgtagtctttattgctataatgctaacaggagtgaggacaatggtcaaatatcctagcggtagtttagccgcatttagaaaacctgtaactaaaaaagatgaacatccagttcaccgatcatatcatcataaaaaaggtgttaacttttctgatcgtgggatgacacttgagcaacaaatcaatgaatctaataaatattatttaatggaagaaattgcagttgttcataaaaagccaaccccaattcaaattgttaaagttgattatcccaaacgttctaaggcggtcattcgtgaagcttactttaggcaagcttcaacaactgactataatggtgtttataaaggatactatctcgattttgaggcaaaagaaacacggaataaaactaacttcccattaaaaaactttcatgaacaccaaatttttcacttggacgaatgcttaaaacaacaaggaatttgttttacaattattaggttcgctagcttagagcgctactttgttactccagctagttttgtaattcgagcttggcgaaaaaaagataaaagctcaatgactttaaaagaaattgaaaacaattcttttgaaatcaaaagtggctttcgtcctacactgccttatcttaaggcggtagataaattcattgcagataggaaaagataatcatggcagataataacaataatatgaaacgagaatcacgaagagactatcatggtcgaaggccaagtagtggccacttatggattagaatcattaaatggatctttttgctgatatttttaatagtaatctctggaatcgggctttttgctttttatgccaaagatgctcctaacattagtcaggaccaattgcagagtggtaaatcttcaagtctatatactaataatggtaagtttttactatcacttggttctgaaaaaagaatttatgttaaaaataaagacattcctcagcaattaaaagatgctgtagtttcagtagaagacaaacgtttttacaaagataagttaggcgttgacccaattagaattattggttctatgttaactaatgccaaaagtaatagtattgctgcaggtggttctactataacccagcagttagttaagctaacggtcttctctactgctgcttctcaacgtactctgaagagaaaagctcaagaagcttggttagctatgaaagtccaacatgaattcagtaaagaccaaatcttagaattttatattaataaagtctttatgaactatggaaattatggcatgggtactgcttctaactactactatggtaagccactaagtaagttagatttggcacaaactgcattgattgcagggatgccgaatgcacctgttgcatatgatccatatctttatccgcaaaaggccaaataccggcgtgatattgttttaaagactatgctacaaaatgacaaaattactaaagctgagtacaatcaagcagttgctgaaccaattagtaagggacttaaatcacatcgaaataataacgagtctaagattagaaaaattgatgatccatacattaaagaggtaatttctgaagttaagagcaaaggctttgatccatatcacgataatttaaagattactattaatatcgatcaaaaagctcaaaacaagctgtacgagttagctaacaacggttctgtaccttttacaaacaataaaatgcaaattggtgcaactgtagttgatccaaacaatggtcatgttgttgcaatcttaggtggacgtcacttaccttctgttcaattaggattagaccgggctgttcaaactggacgctctaccggttcgtcaattaagccagtacttgactatgcacctgctattcaatacttgaattggtcaacagcaaaaatgattgatgacagtaagtatgtttatcctggtaccaatatccaattatatgactgggacaacaaatacgacgggatgatgactatgcgacatgcattggagcagtcacgtaatgttccagctattaaaactcttgctgaagttggagtaaaacgggcttcagcttttgctcgccgaatgggcgttaatgtttcaccaaaatctggtttatcagtagcaattggcgctaatgcgtctagtttacaaatgactggtgcttatagtgcttttgccaccatgggcgtataccacaagccgcaatttgtttctaagattgaaacaccagatggattaaccagaaattatgattcaaatggtgtacgtgtaatgaagaaatcaactgcctacatgattaccgatatgcttaaaggcgtaatcaaacgaggctctggtactaatgcaaaaattgcagatctttatcaagctggtaaaaccggtactgttaaatactctgatgaagatctagctaagtacccaagctataattcaactccaaaagattcatggttcgttggttataccagatcatatgttatgggtgtttggactggttacgataatttaaaggacggtactatttctggaataggtcaacaatctgcacagctaatgtataagagtatgatgacctacctaatgaacaataagcctaacctagactggaaacagcctagctcagttgtaagagcgaaaattgtaaataactctaatcctccagaattagcaactggtggcggcacttggcaattatttgttcgaggccataccccagccggaattggtaatagtgcagcaagttatgatgaagacgatgaagaaactgatacttcaagcgataatactggaactactccttcatcttctagaactgcagttactcaatcatcatcaagtcgtgaaaatggctcatcatctcaatccaatagcagtcagcgagcctcttcctctcaaagaagaacacaatcttcttcaacacaacaaagttcatcaacgagaaaacctgaggaagaatcacatgaacgtaatgatgattcggataatgactaggcaataattaaatacgcgtggtgctagttaaatcgttttagttaataaaaaagtccaatcttgttagactcgacttgtaaatagtaataatagaaaagagtctgatctgattgaactgccttaagcttaagcgttttagccaccatttacaagttagttttaaagatttagtgataatttgtcggcactggtatcgtttgtatgcaccggctgagtttactcatcggcgaaatattgatcaaattaaaactacggacagtctgattttggctttacttatctggcaagctaagacaggaattgaatcacaaagaagattctgtgaatgtttcaattgtttatcacactcacgttttaatcggcgttcacgtcagctattgcaattgatttatcagatacggcaagaaatgaataaaaaggttgacctgaatggacagttcttgatcattgacagctttccggtacctgtttgccaaccaattcgcaactatcgtgctaaaatttttcgcggttatgccaacattggttataaggccaccaagaaaatttacttctatggtttcaaagttcatgtcattgttagcgatgacggttacattcttgattatgtcgtaacaaaagcatcagttcatgatgccagggagacagttgaactgatggaaaatacccatccatctaattactatcttcttggcgacgaaggctatttaggcaaagaactgcatcaacagctaaaacaaatgggttatgaactttggacaccatatcgtaaaaatatgacaggagctaaaaagcacaatgatcatcaattgatggctattcgcagaacaattgaaagcgacttttcgcttctgacctattacaatgccgagaacaatcgagcacgtagtctgataggctttcaaagccggttggaaattgcaattttagcttataatttggcttattgtctagaacgatttaactagcaccacgcgtaattaaatatatttattaacagatagcgttttgttatctgtttttattttggccgaaacgtagttgaggcctgaaattataaaatcaaaatttagtaacaacagattatataaaattattcaataaaaaaagccgaatttatttcggctttacttttcggaatttaaataagaatacggatcgcctttagctcgagctggcattgtataacgaccaaatagaatcatcgcatggtgcgtttttatccattcacttttaggtaaaattgcttctaatcgcttctctacttcatgtggagtagctttgtcatctacaatatggaactttttagaaatccgtgacacatgagtatcaacagcaatagctggcacaccatagccttcagccaaaacaacgttagcagttttctctcccacccctggtaaggtcatcaataactttttatccttaggaacctgtccattatatttatcgaccaaaatttgcgcagtggcctttaaatgtttagcttttgaacgaaatagaccaatagtttttatctcatgctcaatctcttcaattggagcttttgctaatacttctggggttgggaacattttactaaaactaggcataacacgattaaccatcttatcagtcgtttgtgcgctcaacataaccgcacaaagtaaatgaaagttagtatcccattgcaattcaccttgtgcgtcaggatacaatgctaaaatttttttcaaaactctacgtgcttcttcatcactcaataaatcttctgtcatttttatcgattccttttcaaaaatctctcaacttcatcagttgttttcagactatgcctttgccaattaagtaaaacacgatcaatatactttaaagaatatgcctgagacaatacagcctctcgcaaagcaagttcaattaattcaggagcatagtgatccacacttaaccattgcgcaatctcttctcgttcaattggactcagatagcgaccaaattcaacttctacttttcgtgacaaataatttaacggattattttctaaattattagcaactgaaacagttttatcttttttcttatctttgatcaagacgttttgatcaatatagtgatcaagtgcattatacaacttattgagactatatttattaccaattttatcctgactatcagtcatttgttcaatagttaaataatttcgttcaattagccgctgaataagattacccacatcactaaccgataaattagtattagcagcaatcttttcattagatggaaaactctcacctcgttggctaaatgcttccaattggattatcaaaattagttcagcatcactaatgcctaattgagggtagtaagcgatcaatccattttgtaaggttgtaaagcctaatgcccgataatcattaaattccaaaataatttcctttcaaaaacaaaagttgaactaataactagtccaactttgtgtatcaatatttaattattaaccaaattaaggttgcattctgttaatcaatcttgggaatggaattgcttcacgaatgtggtcaaggtgacaaacccaagcaatagtacgttcaaagcccataccgaaacctgagtgaggaactccaccaaatttacgtaagtcaaggtaccattggtagtcttctaaattcaaaccagcgtcaagaatttgttgcttaaggatttcgtaatttccttcacgttctgagccaccaaaaatttcaccataaccttctggtgcaattacatcagcacataagtattccttaggattatcaggattcttcttcatatagaatggcttaattgaggttggatagttgacaatgaagactggacgatcatattgttctgaaatatagccttcatctggagcaccaaagtcatcgccccacttaatatcacgtccagcatcttgaagcattttaattgcatcatcgtatggaagacgaacgaagttaccttcagtagttgggcgaagtttttcaggatctctaccaagaatcttaagttcatattcattattttctagaacttgcttcaccatgtaggcaagatatctttcttgaatatctaacgattcatcttgatgcatccaagccatttctggttccatcatccagaattcagtcatgtgacgacgaccctttgattcttctgctctaaaagttggaccaaaagtaaagatcttaccataagccatagcaccggcttcaccatacaattgacctgattgtgaaagatatgcatcgtggtcaaagtattctacatggaataattgagtagtaccttctggagctgaatgcataaagataggtgcatcaaatttgataaagccttctttttcaaagaaatctacagtagccttaaacatggtatttctaatttgcataatagcaaatggtttctttgatcttaaccataagtggcggtgatcaagtaagaagtcaacaccatgttccttattaccaattgggtaaccttcattgtttgaaaccacttttaaatcagtgatttgaatttcataaccaaagtgtgaacgtgcgtcttcatgaacagtaccagtaatgtaaaaacttgcttcttgtctaagtgacttagcagcatcaaatacttcttctgatacatcattcttacgtactaccccttggaaaaatgcagtaccatcacgtaattgcaaaaagataatctttccgcttgatcgtttatctgttaaccaaacatgcatcttgacttcttcatcaacatgtttagaagaatctttaattgaaatcaattctgtcataaaatcctatccaccttttcatcaattatacagtttccataataccaaagtttctataaattatcgacttctgagatatcatttccatttttgaattcatataaagtataacctagattgccgttttgttttttgtaggccacttcccaaacgacctcacccttataccaaccaagattaatattatttattgtagcatccgtatggatagatttaaacttatttttaatcttagattcagtgattcctttggccgcaggatatagatatgcctttttagaatttggcaaataaataaagtaatattgttttcccttattattggtgcctgctatagcatagctgctagtgccgcgatctaaatgataatagttttgaatctttctaattggtgttttactagtagccaattgcgtaactttttgatcattgccccgacttctagatccagcataataaaagatagcaatgctggctagaaaggcaactattatcaaaccaattacccaactcacaaacttgattgtttgtcttgtatcatcttgtaacatagtttaagacctcatcatttgttatatagtcatttatagccttttgagctttaatttatctttatagataacactaaatgctttactttttacgtagattttacgtaaaatctttagttacgtcaaaccgcccacagtcaaactgtgagcggtttttcattaggttaacttgacccaattaataaatcatccaaattcaaatttattatagcacagccctatccatccccacattaaaatacggggatttccgggcatttttcattaaagggactattctcacaagtattatatttgaaacaacgcaaaaaagccaccccagaggacgaatcccccgaggtggcttattgcacaactattgattaattttgacaaaaaaattaaaagcctatatactaaatcttgttcagagatcagtatataggctttgtgttgtcgttagtttttgccactaacggcttttttattcctcttcgtaagattcttcgagtgctttcaaagcttcttttaagaaagctttaggagcttcatcaaccttacgccaatgtcttgcacttaggtccaaagttgtttcttgctgaacttcagcaacaccatgaactttcaatccattaggtacaggaatatgcaatgggaactcattatcagttgtactaataggtactaccttaacaagtgactgcgttaatctagtaaaatcatgatttgacacaactaaggctggacgattacctctttgttcatgtccaagacttgggtcaaaatcaatgataataatatccccttgatgaatatcaattgccaaaaaatcaccccctttctaagtattgatatttaccaagaaatttctttcccaacaggtttaccccaatctacttctttagattgaccaggatgttccttattccattttttccagtaagctttataatcaaagccttcaaagcgttgagcaagcttgctttctttttttctttttaaaactagttctttattcttaacctcaatttcgaatgtagccttttctgtggtaattccaatttctcttagtaatgatttagataacctgattccttgagaattaccccatttctgtagtgtaacctccattattaataaacctccttgaaaatgttgcaactatagtatataccttcagatatactagtgcaataaaaagagccaccccagaggacaaatcctccagagtggctctttcgttgctatttaaaactgataatttaagtatcaaaaaagcccttgcggcacagcaagagcaacaaacaccgactagacggctagacacatgcccaaagtaaccagcttcgggactttaaacgaaagtgtatcctttcatgtccaccactattatatattaaaagtgaacaatgtttcaatattttgttcttattttaaaatttgctaaaatataaatggttgtgtggaacccaaccaattccaaattatcacaacctagaaagtgttactttcatgtctataacagcttttgtggctactactttttcaagtgttttagccactgtaattgcttcatggatcattaaaaagtttatgaagtaaaactcaagagagcaagtgggtaataccactgctctttttattatatcattacacaaaaaaagagccaccccagaggttttatcctccagagtggctcttaaaatgcattttaattcacttcattaatacttatatgcatagaagcttaaagctacatataaaggcaccattctgcccgataaagtcattttatcatagaaacacaaaaaaagagctacttcaggaaattaatcccaaagtagctcttttattgtccaatataaattacatttacgattatagcacgatataagcgcgattacctgtcacatatacctgcttgcctttgtgtagctctttaatctttaaaaagcgtccgactcttccctggatctcgacttttgagttaagcttcaagccgtagaccttgcctgcgtcagcctttggtgcgtccagggcgtgggtgtgaggcagaacaatcttagcgacagcgtgttttgagtcgttatatgcgatagggttagcctttacgtaaacggcacgaccgtcaaagtattggttcttgccaaccttcacagcgccattttccaagccaaacacctgccacatggagccacacggttttagcttgtcagattcccgcttgtctaactttgaactggtgtagacataagcaccttttgaattagatactactgcgacagcaccaatattccacttcacaacgggatgcagagagagcgattctacgctcttgttcgttgatttgggcttagaactacctgaattagcctttaaatcgatcaagcagatattaccgtcaacgttataccccttatagttatcggtaaattgccagattgcaacaccgtccatggatgggaagtaattaaagtcagcggaatcttgacgacccatgactttatatgaagctacccataaacaagttccgaatgactttacaattcgagctgtgttgagccggttacgcaaaacataagcgccagcatagacaagtggcttataccctgcttccttgatcacttgcatagctgctatgacagcatcggtgtttgaaccgacagagccgttgacgtcgttgccgctgccctgctcccagtcgtcagcgatgtagctaccagctgggacgccataagccttagccttttctacggcatacttagcttctgcccgtgccaatgacacagagccagagtgtgtagcataaaagtagccgccggttaaaagcccatgagcaagtgaactcttgatttgagcttttgcctttgggttgatatagccagtgccctgtgtaagcttaatcaatgcaaatttaatgccggcgtagcttacgttttctgattggtagcttgcgacatcagcacccaaacttctttttgatacggttaagtttgacatctttttcaccgcctttcatttggtttcttttggcaatcgtttggttttcaaacgattttccaaaagattcaaaaacgtactcgttgtacgtcttatatctagtctttgtcatcagaatcatcaccgcttacaaaaccaattggttgagcattgtcatcttcatcttgtgtagccttttcttgatcagcttgcatttggtcatatgcgtgttggacagctcccttagctacggattcggtaaggggcttgttttccttttgtgcttggttcagcaaagcttcaaccgccttagctttcttttcagcacctgaaatgtcgagcgtagcggcttcacttactacgaacttggcaatctggtcaatggtcataacttcctttggtaaaggcttctttgacttagacgcaaagaaatcaataccagtagaaacaccttgacatacagcgacaaaggcaagaaatcccacaaaaagatattcattaagttggcttaaattcattagtcagtcaccttcttagttaaaaaagaagtagtatctggcttattttctacttgtggtgctggtgtagtgctttcaggatccttgaccattgaatcgtctttgattcctgcaaagtagcgaacccacttggtaacctctgccttgatgtcttgtggtgcatcgtcaacggttaaaacaccgtcttgcaccaaggtaacgtaatctaaaattctagtgtttggcttcattttcacttaactcctttctgagtttttcattttcattgagtagttttttgttttccgcgtttaagcgcttattctgttcaacaatgtaatctcggttattctccacgctatccatatcacttttcttaccgttttgcttaaaggtaaagtagcctaaaagcaaagcggacaaagccgatataatgctgtttaggtcgacatgcactatatcacccctaacgctttgaataatgccttgctgtccagataataaaggctataaccgccgtatttgacaaagcgttctggacaaactccatttcatgggcaaaaatcacgtgttcaatttcgattgatgaaattattgctagcagcaccacgacaagtgccaacaacacccctagaagcttattgttgttgtaccgtgaacaggtgtaaaccagcaacgcaatgcctacaatcatcattgaacaatctaagtaaacgttgttcatcatccacgctagttgtggtggataaaagaaaaatctgcggttaaggtaaaagcccaaacctttaccgaaaatcagcagactaatgatcacgtaaagtgagttattgttgaggcgttgcagtagttggcgcataagcttcgcctacaatcttttggtaattttcagctgataagaaaccttgtactactaggtccttcatgccgttcttatcataaatgccgaattcccagtccatacgatacatttctaaaaagtttgcttgaatttgttccattaaagtcatgatttatgtcctccttaactattgcttatcggttgcttggtccactggcttagtatcagttgttgggttagctggtgtagcgttattagcattttcgccaactgccttggttaccattgctaaggtcttttgcatagcaccaagaatttgattagtgttttgagtttgttcagtaaagctcttcatcaaagctaagttttgcttagatgattgagcttgaacttcttgcatatctcttaatgcttggtctaccttatcgttggctttgtcgagttcagcactcttcttgtccaattcagccagcttttgtgtagtttcttgcaagataacggcttgattgttcttgtcgttctcgctccaatcagtggcgcccactgtccaaactgggtctttaaagctgtcagatggtctttcagcgtggacttgccatgggagcgccacacttgcttcatcgccaaaaactgggattactttgtgatgccaaacgggatccgcattgtcaggatctgacaagtagacgaagcctgtaagagttgggaactttgcctttaaagcctgttcttgttcagcaacactgttttgatcttgtgtagcgtttgtttcggcgcccgctactggtgcaacttgtgtattttcgtcagccattttattggctcctttctatataaaaagcccacgggaacgccccgtgagcaaggttattttttgcataaaaaaagcactcgtttgagtgctaatctacgtttatttctatttttacccagtccagttgacttacatcgtgagtgccattatagtaatatgcttcaattgcatttttccatggagagaatcggatttgataattatttttagtcacattatccccacaatcattatttccagcgttggtataaatcaaataattagtcataataaagctatcaccgttactaaaagtaaatctagtttttcgattcatatctaaggcagaaatatcagctacatagaaatcattagtgtggttagatataacttgtaaagcattacctgataaagttttagtaattgtctgatatttgtattcacgataagtcttgccattagcattgactgttacatcactgctactaattggataataattttcttggttaaacttcatgtgatctagcatacagccaccgcctttctggtggcggctctaagtacttggtataggtggattaacgggctaattacccccccctaagatttccgtacagtccgattttcgaacccatacaggaccatagacggtgctactatctctctcactgataattggcaaatccctatttctgccaactagatagccgtttttcgaagaagcgcatacgtccagttccagatctgcgttcattgaacagtaagtagtatttggaaaatccgtaaaaatggtacttatttgagctccttggggaattttgacctttttagggaacataagataatcatttttattgaagatcatcttttcaatcatagagccaccacctttctagcagtagccctaaacgcttgacgcaagttggttagagggctaattacccccccctaatttttccgagccatcaagttttaaccatttagaattatcttgatcagtcaaaatatatgtgccgcttggcgcattaccagctgacccattaaatttataagctgctacaattaaggcattttctaccttggttttagccggcacattgctataatccgcagcagtaaagttaaatcccgctttaaccgtgtggtaagtatcaagcgacgcagtgattcttttaccgatcagtgggcggttcgtggagtcccaccattttaatttgttaaaaatcatgtgatctagcatttaagccacctccctacgtgggtagaaaagtgacctaagccgttgatacaagcgtataagtgaggtattccccccccagttttcagatattacggcatcagatttaattgcaatgggacctgcatcagttcggatgatataaatttttccataatttgaaattgaaactcctatgacgccgtaggtgccgtgacctatatttccaattggcaaggcagtagcagtgtcattaattttaacgttttttggaaatgcttgccaagttttaccatctatctctatgctttcagcatcgtctttaatgttgaaccacttcaacctattaaacagcatatgatctagcatgttttcgctcctttcctaattgaagagaaagcacgttcaaccattgatgcaacagtatgtagaaggtttttaccccccccattttgtacttttaacatctgattcacgaataagaccgaatgacacaaaattaacttcatatctatgatcgtcaaaaatgtattcttcatcaaagctcaagtttaatgtagcgttattttctgtgctttgacccgttccattaaaaacaccagtaactgcgtaacagtccgtaattttaccaatgacattcgcagtagtgtcagaatttagcataattatggcatcgggtgcagaagcagaaccatcaccagaaaaagtcgcaatttttgccccttgtggtaagactacttgtttaggaatagcttcccaattcttgccgtttgcggtcacgctatcagtattgtcactgatgttgaaccatttcagtctgtcaaagatcatgtggtctagcatgctttcaccttctttctatctattttttcgatcaatgcaaagtagtttggatgatcattttcccattgttgagcttgcgcttcttgactagctgggaatcttctagcaattgcggcattatccttcaaccagttaacagtgccgatcaaatcagcatttgactttttcaagtcgttgatctggttttgcaagttggttgtatcctgaacggttgcaagttttttccatttaggatagttattgccttcccagtacctcaaagcaattgagtcgccacctgaattacctactggaatccaaatttgagttttagcgtttccatcataattaatgttgattagcgtgccacgcttatctgggtagaaatccggcacattaagattgccagagttacttaatttgtaagtactgattgaagaagcgtcaccaactaaatcatttgcattggcaacaccgggaatttcagttttagcgttgagcttattgatattcccgttcagtgtgttaaattgaccttttgcccagttaacgatgtcttgacctgcattctggtccatcaagatctgattgccgccgtgcaggttttcttccgtcatcttagttgtagcgtttgcgttagcatcaaagccgcgggcaacggttgaggtaacgtttacgttgccgcttccgtcaggggttaagccattaacctttttgactgctgagttagaaacactagttaagtccgtcttagtggcgtaattgccgatgtttagtccgtcaaccttggagtcaattaatttgatgatgtcattattagataatgtcggaagctgaaaccaatatccccaatgattattactaaaatagcggattgcatatttttgttggctggacactataagctggtatccagcattagcatccttgactactttgattaatgcgtttttccagactattgggatattaaaaggagtagttccatcttgcattttagggtaattgacaaagctagcagcactttgggaagtccgatatgtcccgcttggcaggtcattgaggtcttttaaatctgccggaaaatccttaatgcggtcactatcaacgatcaagtcaagaataccgtcatcatcgggttcaacaaccgccccgtcgttgatctttgcacctttgaccttgccagcttgctcaattttcgggtcatactccgctttgagcttcaaaatagccgcgttgacatcgctcatgtgagctacgccaatctcgttaaccgtcaagtcaacttttgcggcattgctgatagccattgctaaatcaatgtcaattgaagccgttgaccggtgatctggcgaacctgccgctagtgtttgttctccgtttgacggtgatacaccaagcaagatttctttgttatcgttgttgtttttagcgtaccaaccgactgagctaaacgttaagtcatccgttaagtccttgttgccaaatgaagccgaaacggtgattgtgttgtcttgtggaggtgtaacaattacgttgacctccattttttgattttcaagggtggcaagctttcgaatgtcttcatcagccatagagctgacatcttgaccagctagcaccgcccgtgtatatgcaatttcgccattaccagcgccgacattaatgagtaatttacgccctgcatcggtgataatggtgtctttgaatttgtccattttgaccttctttcattagattgcctttaaggcttgatattcatgtgttaaaagcttggtaccgatgtacgacatgcgctttgcttgtgctttccaaccttcccaccaagtagccacttcttcatgtgtagtgttttgcaactcgttaatgtctgtcccaaaataccaatggttatacgtggtagctttgtagccttcccaccagatagacgcaaatgttttgatgtcatggtccctatcttgcgtggtggcacctagatagccgtgaacgtgtgtagtagctttaaagattatcaagtcaagccagtaacccatcgccagcattttttgcaagttgttaagcataaacttttccatttgcgggttttgaaccgcatcaaacggtatctgcatccctacgtgacgaatacctgtcttccagattttgaaaccgtggtcatattcaagcgcactagacgttattttcacgattgagggtacagtaccctgtgcccgtgaaagaagctccataacgtgaataatgaagcgataattgtcgtcgtcttgacttggtctatatgtctggatgtcggcaccaaaaaggtcgagcgttgttccttgggcgtcttttaaagcacgccagcgctcgaccttatttgcatttgtactaatcccttctagtggctcgttaaaggcatcaattagcttataaagattgccaccaggtcgcttataccagtagtctgaaatctcagctaaaagctgttcagaagtctcatatgccatttacgaccacctcaatatttctagtgtcacaagagacggcttcaaacggctgtgtatgtatatctttatctgctaaatgttcggggtcagttccgatctcaacgagtgcctcaccaacgccctcaattgaatagatagacggataaattttggttaggtaaacggtaccgtccatcagtaaactgttgatgtaatcagctatttcttgctttacatagtcagcaccgtcgtcggcgttccattcgtcagttgtccgaattttgacccttgcataaattggtttgtcggttgcgtaatcaaaattgatctttttaacctcacctgttgcatcttttgcttgaacttctttgctaccagtaagactgataccagccgctactttatctgctaagcaactcgctatatcgtcttcttttccgcccaaacaaaaaacgtgaaccgaatacggtggatttccgtattggtccgcgtctgcgaacggattttcaataatgtttacttgtcttactcctggtaaattcattaatgctgatttgataccagctgttgacggtccaggctttgccacgttttccatgattagccgcgctctatatgtggagtcgtcttcatcatcttgtccgccagctgccttctgcggattcgtcacactaataatgtcttcgtccggattagaaacaatagtgattgtgttaggcaaaacgttgttaaagtcaccagtttcaacggattggacaactcctactccaatgtactgaccatttgaatcttttgcggtagttacgtccttgataaggtcaaacacaacaccgtcatcggtttcaaactgttcacctgcttgtatcaaatattcgtcatcagtcacgatttgaatgtttgcaaagcttggtgtagcaactttccttggaagatctaggttagcaccaatccgatcaagtgagctttcagtagccgtgctgatataagcagaatagtaagttttttgcagttcttgaattagcaaggtttcgcgccacgctatcagtcgggcaataattccaaaattggaattacttgtcaggacgatatcggtgccaaaacgttgcatcaagtcatcttctacactgtccagtatttcttcatatgtgggagctaagaacccccgcttgtgtagtccgaaactagctatcgccaagttcaaaacctccctctacgtttttcggttgaccatcgccaacttgaacagttgcgctaaaagccacatataagcctcttctaggcattttcttaaaagtgatactattaaccgttttgacctctggaaccttttctgtgatggtcgtagacatgtcagcggatgcaagctgagcgttaaaattcttaccaatgaaattgctgtaatctgcgccttgatctgggtcaagattaggcatttcaccgtagcgaattaacagtgtagcccttattctttgggctatttcgtcaattccttcaacgattgctaagtcgtgagtagtagggtcaataactaaatcaccgtactcattaactaataaatccttagccatttttcgcatcacctccgagaactccaacaataatcgcatcattagcatcatgaacccttgaactattcggagtgtaagtgttgacagctctaccaccttcccagttgtcattatcacggtctaataccaccgcaactactgggacgccctttctcataagcttctttttaggcagcttatcaaccaaatgcgaacccgtttcagaatcaattcttttaaattctggtttaagtcgctcaatcatttcatccaacatgtaacaattttcagtaaccggaatatccagatattgtgctgatgtttcgccgtcgcttgaattagcaagcggtaaaatatccgccgtatgatctttcttgttatagtcaataacttttgcaattaatgcattttccattccagaaataatgccccattgaaatttgcgcattgcgttgatagccgccttacgttcttcattttgtgattgtgccataacactcacctccttaaatctttccaagtgaacattgcgtttgtgctttatccatgtcaaatgtatgttgaccggctttcacataaaaatagcctttcaaatacttactttccatgtgaatccccacgttggtggttatgtctggaaccaatggaaccatgatttcccacgttcctttaccggagctgtcatcgctactttcgttgtaacttggtggctgtaacaggtcttggccatcaatctcataccacgttctctttgtgctttttggattaatgatttcaagctttccttgaatgtaggtcatgattgaacctgtttttttgaccacctgtttaagcagtgttaatggtttgccctttgcggtaaatgactttttcaaagttggattctttgctaagtcaatcttagaaattacgattcctgattgacttgcaattcctttgatcaaagtcttatagtccgtgcctttgcgaaacgtcttattaactttgactacttttgtagcacgggttttaatccgtttcttacgccacttacctttaatggtttctttatatggcgttcgatggcgaaccgtgtacttctgtccttttttaggacctcgtttgtactctttggtctctgtgtaatggtggtatctagtaaccgtcttatcaggttgcttgacccacttcgttacatatttgttgaccttcttttcttttgttactttcaatttgcgagcggctacattgctgtaattcgtgccctcagtgaaagtaattgtaaaggtatcagttgtaccatcgtggttaggaatgccgattttttcgataaatccctcagcaagaatcttcttatctggtccccagttaaacgcaacatagcaatagaatttcttatgataaaaatttgcatgctccttggtcatgttgtacaaagtgaccgtattttgctgtggcgtagacgaatcagcaaagttaacttcaaacgtaaacggataattatgcttataatgctcgttgttgtaaacggtttgggttttgcctttatcgttagtgcagacaaaccacatgtgtgggttgctagtaactatcaatatgagacctcctgatccgttaaatcgtcgctatcttcgtcagggtcataccccagtggtttgatagtcgggtcttcgtcttctgaaccaagtggatcaatcacatcaatgtaaatttgaacatcatagccaaactcagccttgccggcatcttttgcgttaccagtttcgtccatcactctcatatcaattcgaggtaaacgagtatcaggaatatcaatagcgactagctgattaagtataagcggctcctgttctagcaaggtttcgccattctgataaatagtgatggtataccagtcagcaacggggttatagtcaattcttagcgtgtaaacctcgccagccaattcgatgtcgaaaatgtccggcaaatcatcaatgttcactggaatatattgacgcatttcacccctccttacttaactcgcatcttgcttttagccttatgcttcttatcgttgacataaatcaagttgccggcataaatccggttaggattcttgatcttgttgaccttttgaagccaagaaaccgacttaccatagcgtttggacaatccccacagggtatcgcccggcttgatggttattgcggtgtagttcttgtttctgttgcctgccaacgtcttagaagacttcgaccgcttagcattcttctttttgccgcttgtcgtgatctcagcagctcgaacaaatgtaaaagttattgaaacctgcatcgtgtttttgaaaccggtaaattgccggtcaagttgtgatatcagcaagtgcttgtaataaatgtcaccacggaacgttaattcttcatggtgactgtgccacgttcttaactgcacccatttatcatgggctgtgcgaccgccgttaatgtcgtcagaaataagaccgtcaatagtgaccgtcttagaattgaatcttgcgtaatctttacgaggtgccccctgatcaacggcataagaagtaatgtttgatgaattgctttctgattccgtatttgtggggctaaaaaagacaatatcgctttctgtcccgttgagtgtaggaaaaatagccatattgccttcattcgtaaattcttttttatgttgttcaattttgctgaccatcgcggcttgatccgtggtcttgcttttattaacacgctttttgctggtcttagctggtttaagctgatttctatactttttgtatcggttcatgtctgcatgatattttttcatgtattcttcaaacttcttagtatatttagctttcagctttggatctttcgtgttaaagacttttgctgaaaagttcattgccgtcgcattggctttcattgccgcacggtgagctttatcagccttatctttgatttcttttatttttctttctgctttaatttgcgccttagtctttttgcgccccttacggggcttagacttgttttttggcttttcttttttagccaaataaaaacaactccttactaataaagcgatggatccgtacctaattcatcgcttatgtttactagaaccttattaatttcacggcgtaccagttccgcaatccgcttagcatcctcccttgtcccgtagataggaccgttgaggttgatgttaatgaccggcgctgagctgtgtgaccgtgtaggtctgttaatctttggaaacttaaacatttgcgctaagtcagaaactttacgctttgtttgttcgtgactatcaactttaacaggaccgtcagcagtgattagctctggaccacgttcacctgcaataaatggagtgtgtgcttttggacgtccaccctttgcgtaaccgcgaccattgcctaatgctgacaagctagaaccatagcggtgcttagcataattcaagccagcgtaaatgttggcaggtccgttaaagataccgccagagcctttacgcttaaaggcttcgaatgttgctcgcttagtttgcataagtcctaatgctggaccagaaccgttaccgtctgggtcactccctggttgtcttgcgttaggattaccacctgactcagtttggatctgacgcaatactcttgcgaccattgaatcagaagtagacaagtgcaacataccaagaactcgtttaactgtaccagcccaacgcttgacgccttcaccaccgatgttgccaccgagtgaaccttcatcgcctaacttgtccttaatccactttaaagcggctggaccaagttcgcgttttgctagtgcagttaagttagtagctggctttgcagtcttcttagcagttgatgcattgtgtaaccctttgacacggtagaaaccatagcccatacccatgtcatcagcaattcgtgtgacacgcgcttttggcggtgtttcattgaacattgtcccggttcttggattcttgacgatacccacgtgaccggctgcgcctgtcccatgaccgaaaataaccaagtcacccggaatagttcgattaatgcttttaccaagatattggagggcggaactatgttgcatatcaacagttgaacgcccagcattaattccgaaatgctttaaagcttgtgcgaccataccagaacagtcactagccgccttactcatagcacccatgacatatgggacgccagagaatgtagactcagcaaatctcaggaatgcttcacgagtgccacctttaccatcaccaccgccgattgcgttgttgatgaccgtccacatcgcgttagaccaagaattaccgaagtgctgagatgaattttgcgctaatccgatagaaccacgctttaaattcgatccgcttggtttgagcttgtctaagaacatttctttgaagctttgtgctgggttggctcccgccttctcagcaagctttctcaatgcgctatggcttagccctgatcccttggcaaaatgctttacaccggctgatttagccacctgttgggtctgcgccccgttgaggacaccccagccctttggtagcatcatggtgacattgttgccacgtggtaagaacaattcattcttgtcactaactaaggcttcttgtcttggtcctgtttgtgcatcgttgaccatagcaagggtattttcggttagacgcccgtttgcgtcagtaccagtagcaaacttaactggcttgataactgaggtattaccgccgaactgtccaaggaccttgtcaattccagtaatacccttgttaatctcaccaattgagtcgctcattgcatccctggcaaagcctttagttttgcctaatgctttaccaaagccttttgcagtggattcactaagactgataacaccgtcatgggtcttgtccatctgcttgacaatgcctttgtgcatgtctgagtagtcagagatagcccgttttcgggtcttagagctgtctttacccgtttgacgtgtaatcttattccaagtgcttgagctcttcttagaaaggctattaagtgacttggatgacttgtccgcaatttgtttgtagtcgttagttaccttctttgaggttttaccaagcttatcagttccgcttgcgtagcctttgagggttagcccattacctaaaccgccgtttaatacctttgcggtatcgcgtgcattcaggatatgctcgccagcataaacctttgtaaattgcggaccattagcaccaagcaagcgaacgttgttagcataaggtttgtatgctaattcgggaccagcttcaccgacaagggcaccgtgtgaggcgtgcataagcccaccgttggcgtgtgccttgcctgttagtttacctttaacccagttgactcccttgccaactgcaccaagtgccgccttgacaggctttggtgtgtgatcactgacccatttacttagaccttcaaaaggctttttaaataggtcaacggcatttttaccaagattgccaaaccaagttttaatgcctttccaaccagattgaacgtccttgttaattccaccagcccagctttgcatgccattccatttagacttgaagaacttacttgatctgtgacttagatttcctgaccatgaggtgaaaccatgccaaccgctttgtacgttcttattgactccgccagcccatgacttcatgccattccatttagacttgaaccatttgcttgatttatgacttaaatttcctgaccatgaagtaaagcctttccagcctttttgaacgtctttgttagttttaccaccccagcgctccatgccgttccacttggacttaaaccacttattagactttgcactaagctgtttagtccaagatgggaagtctttcatgcctttttgagcatctttaacaactccatcagcccattttttagcattaacttttggaagaattccagatgctttaagctgcaattgactattttggggctttttaccatgaacttgtggtttaaatccagctagccatttattgaatccatttttctgaggatcaaagcctccccagtcccaattttgttttccagcccatttaccaatatcgcggaataaacttctagttctatccattccatcacttggcttaccgtgtggattaagatgcggattgtttccaatccacttataaaagccactccaatccagccaagttcccttggtttcttttttgacttctggaccgcttctacgccaaaagtctctatcagcaatatgtccagcagcgttccaaatcgtagaagcagaaccactcaaaagatcccaggcattatttgaatgcgctaaggtctttaaatttaatctatgattcattccccatgagcgttcagcaagggagcgttgatcatggtacttattggtctttaaatcatagtatccattgtcatcataagcatacagaagctttttacctttcagcttatggtcggacagggtgtaataaccggattcattatatttttcggcttgactatcatacttgccgtttgatttgctgccttttttgccgtaaaccaaatacttcgcagcatgtccattaaaggcttttacaaaacttttagcggcatcaggtcccatagcttgaccaagttgtgcaccaatcgtagcacctaccgtgccaccgagaactccaccaattccagcaccgacaagtccaccgataccagcaccagcactttgaattctttgcgttgcggttttagcagttgcagcttgataaaagtcgttaccgatttgagccgcattaaatacagcagatacgccaacagctaattttgcgcccttggtcatgtttttaaagctggtatttgttccagttaactgccccgtggttttaccaatatatgcaaccttaggacttatatcagcaagcttcttgtactgttcgtacaatccacccacaaatgagacagcttttgcaactttgacggttgcgtatcctgctaagaatccaccaccgacaaacttcatcatcgtttcatgccgtgtagcaaaacgaatcaggcttacaagaccgtttgcaaagtcacctacgactttaccaacgcccttctggaatttttcaccatcttttgatagtaagaacttagcaagcgagttacttgcttcgttaattgccggcaaaacagcgttacccagcgtcatcttaaaggcattcatagcctgttgagcgctggcggcgctaccttgtgcggtacccatgttctttttggctaattcagctacatacgtaccagtcttaccggctttttctgtccgcttagttaagccttctacttctttcgaatatttagctaaaatcatggcaccgttcatgccagtagttccgaatatcgacttaaagaagccgttttggtcggagccacctttactatgctctttaatgtgcttgtaaagcacagccatatcttgcgacagccctttcaggttgccgtgtgcgtccaccatttcagattttttaatgccaagcttggtaaagatagaattcttagaaccgatcttgttaacttggttagttaatccattgattgtggcacgtagggcagtaccagccttgtcagattccaaaccgttgttagatagaacacctagcgctgacgctgtttccgccaaactaatgttgttagagtgtgccgcagtaccaacgtacgacatagcaacacctaagtcactaaaacctgttgaagttgcatcagccgagtaagccaactcgttaacaacgtttttggtgtttttcagcatcttgctggttgagtctgcacgcataccgaatgcgtcaagaacctgtgaagataccgtagtaacatcgctgaatttgtcaccagatgccacactggcttgcaattcggtttggagggctccgattgcttgtttggtggtataaccacgcttaacaaggtcttcataccctgccgcgatttcttgctgtgacttgccgtatttaatggacatgtcacgcccttgacgttgcatttcagtaaccgacttagttacttctttttgcttttcaccaccaagaacagcaaggttgttaatttcgcggtacctttgctgaattgccgctgattgcttagcgccagaaaaggcagccgcaccaacggcaccaattccagccgccgcaactgttgcaccacctcggatgctgtcccacgcgctgtggagcttactcttcatcgtactggtggctttggtgacctcattagcaccctttacccagcggttaaacccggttggatggattcgttccatctcagattgagcggacttaattccagctttaaacttgttgatttcagcaactgtttggttaagttttatttgctgacttctataagcatcactagccttgtcagtagaactagtggtgcggttcaaggcactttgcaaacggctctgctcggcgcttaatttgccgatcgcgccctgatatgctttgaccttttgttgattagcctcgtatgttttaccctcagattccagacgtctaacatatgacgcggttaccgtgtcaatatggtttatttctcttggaaaattagcggacatgtgcaagctatttgcacgtctctgcaattccccgaacgctgagtttaaagcctgtgtagcctttttagcctcattcacttgcgtaaaattagcttttaaggacagcgacatgccttcatgtgcatcagtcatgtattaacgccctttctttttggcaaaataaaaaagccatcagtttattttctgattgacttcacctcactatttcttttcatcaccccagacacctaatccggtggcgcttgcttgcatgttaaaacgttgtttttcttctctccgcacgatttcccagtacatgtttaactggttcctgtttgctttcatggttaaatcaagcggaataccgtgcatagccaacctaattgggtcttcccaacggtcagccgcttcttttagatgttccttattccaagttgccgtcgattccgtcgttaagaaaggaaagcacttcacgggcaacatctaccccacccttgtgagtgtcccagaaatcaaggctcttaatacgtggttgaacaaatacgtcattatcaacagcattgcttaatacgagtgatagcttaacgtcaccgtcacgggttgaatcgtcttcaatcattgaagcaatggcaaaacctgggtattgaagcgtcaaagtgtattcttgtggagttccagcgttaagagtgatgtccttagtgataccacgttggttaggaactgcaccggtttgaagttgcttgtttctagcagctaagacatcagccatgctaattggcttatcttctgcctttggtgcttctgttgcttgtgcgtcaacatttacagtagtttctaagttttggttttcagtgttagtagtgttgtccataaatttttacctcgctttaattaaagaactgaattttctacaacgtttaagaccttaacagtgatggttctttcaccggcttcgtttgcggcaccaccgtcaggcttcttttggatatatgcgtgtgcccccacatagtgacgtgaaccatcacaagcatcaaccgcataaccaccgacacgacgttcatcggctaaatcatcaatgatcttgttaaatggtgacatttgattgatggttaaagtaaaggtaccgccagttttgttgttaatacttgcggtacctgttccttgagggtcttgttgaactgataacaaatcgttatcgtatgaaaaagtgaaaagggttgttgcaccatagccataagcagtcttaccgtcaatagtgaagtaaacattattggcgtcgtaggtgcccatcaaccccgtttgtgcgttgttatgagctgccatctaataaatcctttctagtttaaaatcgtgtctgattgaacttcaccgtgtacggtaatggtgtgaattgcgccagaaacgtggtaagtgaaactcaaaccaccgtaatgccggtcagacaagtcttgttgtgattgttcactacgttgtgaagtagttacggtgtaatcacccttaccagtggtttcatcggttaagatgattccttgcgcataggcttgttccataacttgcgtagcaacaccattgattcgagtaattccaacttggtcgtatgagaccttgccattttcttgcaagaattgctctaacttgttttccatgttggtgttgacccagataatgccgtgaatgacgtcaatgtattcaccggacatagtccagccttctgatgtttcaccaacaccactaacttccacatatgcgaatgcatgtgctctatggattgcggacaattcatttgaggtcaagacttctggggttacaccctttaattgcttgaacttccaggtcacagaaccaacggtcaaggtagcaactgccccaacgagagcactgtccatgttttcagcggtgtcatgcttcaagccaacggtgtaattttgaccgtaaatcttgtcaaattgagtcacatcgttgctttgaactactaaaatgtggttcttgttggcttcgaaaatgtttgacagagcaactaagttgtcgtcaacgtcattagatgtgcgaactgcaaaggtccagttaaagtaccagaaagccttcaaagcgtcgtatgcctttgatgggtcatagtccaaaactgccacacggtcggagtggttagattgtgcaaagtaggtttgtgccttcttataaactgcggtgtcttcaccgtaatcaaccgcaaccgcgtcaatgttcttgtattcgcggtaaattgcgccagttgccttgtcagtcttgcgtaataggattccgttcatgcggtcttgtacgcttaattgatctggcaaggtagttgctggcgtagtttgtgcgttagcatcggtgctcttaccgtctttgccatctgattgcgctggcgttggagcctttgcagtgacagcatttaggattaaaagattacccagcccaactactggacgtgggtgtaaaactgaaataaccacgtttacgtcgctgacacggtcataaggtgcaacgacagtggttgtcttagcatctgccattaaatttcctccttatttttggacacattaaaagcgccgtcggtatcactgccgacaacgcttgatgtgcctttaattgattcaattgtgtaatcctcgacattaaagttgaggtctttttctaaaaactcaaagccaccagtaacggtgaaagagcaatcaaaaccaaaatcgtgatcataattaatgccctgtaaagtggttctatcgcccgtgttaccaatgctttgaggtactatgtacgcttgcttaaaaaacctgcgatacggcacttcgtggagtgcttcaaacagctttctagcaaggctcatagcttgtacgctcgaatttgagtgacaatcaatctgcatagtgcagatatactgtctatgcttgcctagccagtcggcgtttggctcttggtcaaagtcaatccatttgaaagtgaaaaacggataatcctccatttcgtcaatgtttgcatcttcaaccaattcgcatcccgtgacctgattgaccagcttgccaagtatgtactgcactaaaaaatgatcactcaataccggtaaattgctagccattagggtgcttatcatctccctttaatgcgtaaatgacaacgtcagaatagccttgaaagttggaattgccagtaattcgatatttttgacctggctgagacggcacttctacgaccgagttcgtgggataaagcttagagctgatccataagagatctgcctgcgccatctcaccacccgtataaaattgagccatgaaagaattttgtgcgttattcggtacaaccggttcatatcgctgttccggctgcacctttggcgcgtcatcgtcttcaactcttacaccgcccacgtagtgaaagtgagctttttttgctgggctgtcatatgggtaaaccgttaaatctactccaaaactgtccagcatatccgcaaacggaatgtagaaactcatagcgtgccccctgtcattggcagtattttccaagtaatgcgtttttgaagctgtccagtgtcaaccaaggggttattagccccacgcttgttatcgatggtcagcggtgcgttacctggctttgtccaacgtctcattacttctctcatatcacttacgcccatgcgtcccagcttttcaagcaagtctttaccagttttgctatcatacataatctcttcaatacctgccttgatgtatcggcggtatttttgacggtaatctatgccggtttttctgataaaagcacgagctggaatgtctactttttgcatcagatagaaatatgtaaccaatttgccgtcttgattgacagccgcaatgtgcttgcccttagggatgaacaattgatacttatttctaacgtcttttgcagtaacgttctttccgaactctttaatagcctgccttgacggaatccataagaagccgctggcgtttttagggcgaatgtgtgccccatactcgttggctcttacgatcgtcaaaagcaagctattttcatcactgaaaaagccaattactacctgatgatggtttaaatagtccatttctttcgtgatatgatctagcctattttcgatttcttcaaagctgtcagccattagtgttgcaccaatccatatcttgtaatgcttccgttgccataaaggttatacagccataaatatagctgcccccacggcgaacgttggaacagatttaatttgctaacgtcagcataagttcgcttcaatactgaaacttgttcgctggtaacgttggcgccaccatcgcccatagccttgttaatcgtgattaaatgcaaggctaagtattgcgtagccatgtcacgagctttgatagtctcaccatcgttgttcttggcaagctttggaaaaccatcagccattgctatttgataagcattagtcaatagcccatttagtgcatcatcggacagtttagaagttaaatctgggcttaattgcttcacagcattaagcatgtcttgtaaatcgtccataggctacctccgaactaggctttctttggatcgttgataccgtgcaattgtacaaatgcgtgtgggtagtacattacaagaccaccaagacgttcagtgtaaggaattgtggtacgtcctgagtggtattcttgttgcaattgttgtacttgttgagccactggaatttgtacaatgtccgcgtcattcaagaagatataacccatatcttgtttattgccattagagccaaagttttggtgttcaagttcaggaactgccttaatgtccttaaaccacggtccaatcatttgcaatacagtcatttgtgggttgtattggttataaggcatgtcaagctgatcaattgcgctttgtggcaaggctaaaattggttgagcatttgaatagccagccaagtgtgtaatcttgctttttgcgtctttgagccagtttctaatctttaaattgttgtctgggtcgtcagcaagtgcatcaaatgtaaccggtgcggttgattcttgcacacctaacttagaaactggatcagtcaaaccgttaatgttaagtgctggattggaattgtgaagcccattaaaaataagcttgttttcggcttctgctagtgctctacgggctcttgttgccattggcgttaagatgtccatgcctacttgttgagcttcaccaagttgttgacgtgagtatctaaccgcaatcgcaatatcagtcaagttggatgctgattcggttacattcatgtcaactactgggatatcgtcggcaccgtcaacataatgagcggcttgaccagcggtagtcattaccttgtatgtggtttgcttagtccatgctggaacgctgaaagtatggaacagtgacatagctgttaattctcgttcctttggagtcttaataacgttgtcaacataggtaagctgttcacgcgttaaatagtccttattcgccattatttacctccgctcttgttatctgtgccagttgttgaacccgttgatggggatgctggctttgttgctggcgttgggttaactgctggtgtgctaggttggtcaacttgtggcgcgttagcattttgcaaacctgaacctgtaacagccgtattagaaagctggatacgggtttgcatgcgtgcggtaccgcccttattgccggaacctaaaaagacgccaacgactgtatcgttagcgcctgctggtttgaaattgccgtccttatcaacggctgcattctcgttttcatttacatcttcattgattggtacttgaatagttccctcacgagctacgccaaataattcaccggtttgccacttgtcagcatcaatgttttcttgtgttaagtagtcagcgtttaagtaagttctgcgtaaagccacgccgaaaatatttccgccggttgctggaactaccaaaccatctttaattgcgacaccttgaccgaagccgattggtgctcctgcttgttcggtgttgattgttgcgcgttcaatggttgctaattgacctggtgcaagttcaccggtgttgtaaagttctccatctggaattgccatttaattacctccttaggctaagtggtaacggtcttttgcgggtttattgtctacgctgtctgtcttgacattggtttcaatacccgtgtaaccaactacgccagagttattgcggttcttgattgagtcaaaataagcgtcaatatagtcatctgacttagcgcttaaatcgactgaatcagtcttgctgatagcttctagcttcatttctttcggagatttgcctttaaaatcaaaagaatcgccaacatatggctttacttcatcgataagtgccatacggtcagcgattgcttgatctagtgcatccccttcaaactttttcttttctgcggctaattccttttcaagagaatcagccttggcttgtgcttcatcaagtgatttcttgttagcatcagcaccaccctttaacttgtcgcgttcggctgtcaaagccttaatttgagcgtcaagtttggcaatttttgagttattagccttgttgtcagcatcaagctttaaaattctttctgcgtctgtggttgcgactgtgacatctgcaccatctaaacgaatttttgtagtttccattgatgttcctttctcttgtgaatcatctataaccatttctgcactgtcaccggttaatctcaccgaatgaccagcacgaccacgtttaactactgcgacgtgattaatttgaatgttcttttgtgccgaatcgtacgccatacccttgaaagtacctttaacgggtaccacatcagtttgaaatccaattgaaagctcttgcttgccgccctgaatttctttgattaatgccgaatcggtgatagtcatgtcaactttcagcttgtcaccatcaacatgggcattattggcggttaatcccttcatatatcggttcgtattggtcacgttcaccgattcttgtgggtgatcgtctgtaactggctttgaatttgcactctcaacagccgaatcagtcaataaatcatcaggaagtttggcttccatggtgatctgcccacttttaccgatataaggaaaaacgcccacacgtgcgattggcacattgcttacatgcaagaatcctgtttgtgaatcaacagaaaacttgttaatcgtcgctgtatcgtaccgtgtcaggttcatgctattcgcctactggcactaataccggttctttggggatgtacagtgtttgcctaggcttaactcgcatggtgtcctttggtacatggttgaaataacgcaactgttgcaaagcgaccttgtacttttgagcaacatcaaacaatgtttcgccatcttgcacggtgtactgttcgcagcctgtataatcgaacatccctctagggtcttttacttctgccattggcttcacctcctttgctactggtgttggtttgacaacttcaattggcttttctacctttggagctacctccacgcttttaggcttcaaagcattaattgcttgcttagtttcttcattggttaaattggttgaaactggtttaatttcgtttgaatcttccataaaatcctcctaaaatttcacaaagtaagaatgttgatttaacgggcttaaatgagattcacccacgggcggaatacttaaaaatttcacaaagtttgctaattttgggcatgaaaaaagcgctccctcgcattgaggaagcgtttgtgtttcatttaatttttagtcaatcgggtcagcgtaacacctgcaccttatcggctcgccaggtagctgcccattatccccgccgttggggtcatcatacttaaattccttgccgtctaactctctgtgttttagtcttacccgtttgtcctccattgaacgccaaatatagcgcgttgagcctgcctgtttgttccggtaagcgtcaatctgggctagtattttgcctgtctgatcagttgcaattaggtcagcatgacgcaaagccataccagttcgattgctgatagcgtggcttatatcagtaagaccgccaccatcattgacaatgcggtaaatgtcgcctttcagctggtcaatatagcgcccttgcatggttttgatcaagttcgtattttctaagatcttaccccaggtatattcgcgcaattttgcgttatctcttaacggatttaacgcataaggtcccatcttcatctgcacattagcttgatgcacacgcgtcttattagcactgaactggttaaccgcataaacaaaccgcatagtcatgtcatgcaagatttgatctgtgaccgtgttttccatatcaacagacatcaaattcaaggtttgctgtacgtaattagtccactctggattacgcgaattatccgcatctgtgagcattttagtaccgttaataagataatgccttaattgcgcgtcagccactctgaaagctattttttgccattctcgaatgagtttggctaatcctcggtaatacgaccgttcaatcttcaatgggtagccatttctacgccttgccatctataccagccttttcaacatctttgtagtactggtcaatttgctcttgcgtatatcgagcttcgatattgtcggcgctgtcagtcacgtttgcgttgttctgcatcccttgaattgcgttgttgccttgcccgttgaacatgttgcggacttcatcaggggcaaaaataccgtttgtgaccagtgttccggccgcatttgcatggttgaccagtgtctcgctttgcgtcttgtcgtccggtgtccatagcggattaaactcaatgtgccattctaagctgtctgggtctaagtaaccgccaaattctttcgaatacatcaacaagcggacaatattcatgatttcgggcttcaaaatctgctcttgtaaggctttcacactgtcataatagttttgcacgtcttgccctgcgcctgccagcgtgccagactgttcacccgtcaaaaccgatttagggatgtttgacgctgttgaaaggtcttgccacaagtaatcaagtaagacattcatgccaccagttggcgttgctagcttggtcacggtgtcatcgttaccagtaaacatcatagcttcggtgtttgctacgcgtgctaattcgtctctgtcgcgtctgaactggtctaatggttcattcatcagcctatcagattggaagaccttaaacgtaaattctcgtagcattttacccactgattcggtagcaatcgccatattattgagttgcttttcacagcgcttgataattgatgtccctgtttggtcatcgtcaaacttgtctaagctgatgtgactatacctggtagcatcaagaacaatcgcattttcgtccttggtttcttgtgttggattaccgtacctgtctaatgtggtggcggcttgttttggttgaatcttcaattttgactctttgccgtagtcgtcactcgttggatcatcgtcggttagatagctttgtacattcttttgaccgaatgcgtgcaatgctaccacattctcgatgttttcagggtcaagagggtcaaatgtactcgttggatttgtctctttaactaggtaagttatatagccatctccgtgtttgcgttgatagatgatttgctgagataaaacctgttgcgtttttaagtcatttaagcggttttgatacatctcttgtaaatctggcttgcctggaataactaaacggaatccgtttcttgtggcgtcttctgcaacctttgagaccatcttatgagcgatagcatcatacttgtatcgatcgtctaaggcttcatagttctgtgagtgatcagctgtcttccatgcaatcgactcatagtcaaccgtaggacttaggtcaagcgaatcagaccgcacaactggcgttttgaagtgccttattctcttttttgccattaacgtcctccttcctaatatctaacgattggaccaccgaacttggtgttaagccgccgtaatgcgtaaaccatcgagtccacgttgtcatcgtgcggcatatttgggaagcctagaatttcagcaatccagtctttaacttctgggtgccatgcaggatgcggtatataaacctgtccagcttcccacattggagacactgacgccgcacgtgcttccttgctgtctgcgcctggtgacaccggcataattcctggaatctcacgtctaagcgtgtcaatgattgccggaccgtttgccttgtcctccactagctttacagtagcgtcaggatacatgcgggacatggctctaatagcgtctagcgtttctgtaaaactcaatcgcttatggcaccaattagggcgtagaaaatagcttgcatcacgacgtgaccatacttgacctgctacaaagtcgtcattagctttactcttgaaagttgcatcccatgcttgaacagtttgatctaagtgacggggcaaaatagcaacatctttttcggttagtcccagccttgccatggtttcgcggctgtccacgtagtactttacccattcatctttgaagatgttaccgccctcaataattgggctttgctggtaaagagccgtaaacttgaccgtccccatgtcgtgcttgtgagtaagtaattcatctaacatgtgcaattgcgggcacagaggctcgccgttcttacgtccaattgcgtctgttgtccctgctgggatgtcctccgcaatggctggcaatttgatttcttcccatggtagggatgactcagatagcaagcgccctgctaggtcgtctgtctgccatctggtcataattacgataaccgagccgcctttttgcagacgtgggtaaaacgttaaattccattcgtcccatatcttgtccttgacggtcatagagtgcgcttcttctgcgttctttacagggtcatcaataaccagcaagtcggcactcataccagtagcaccgccaagaacagaagtagcatagaagccacctctgtggtcctgtacggtgaatgtttgggctgtattcttgcctgttttgaggttgaacaacggacccgaccaatcagaaaaagcacgcctgttgcttgccgcaaactgactatataagtcttgtgagtaagcgactatcatggcgtgcttgtccggatatttcatcaagtaatagcttggaaaagttttcgttatagttaagctttttccatgttgtggcggcatagatatgatatagaaatgctgttcaccgtctgctatcttttggagcttttcagtgattagcttggtatgtggatatagcttcatttcaggattggctagcaagaaatagtctgcgtaacttctacgtgctagcgattccttagcggctaatgcaatgccattcttttcagcggctgttagcttaatcatctttttcacctgctaactttgctaaattgcgtaactcctcagtgcttaacttgtccatcttctcacgcgtcttatcagcaacagtgtggagttgttccgcctgtgcctttgccaagttggcttctgcttctgccttgacagcgtcagcctgtgccttcttgatttgtgctttgtcaagtggacttagtgggtaacgcttaaggattgcctcactggctctctgcttctcggtgatggttggatacaccgtcagctcatatccctcttgggtttcaactgtcgtagtctcttcaccacgtgcaattgctgtgatcaaccgtaaagcctcatcagctttcataatcttgtcgtcttcgagcttttgcatttgagcgtcaatacgggctttgattgtagtattttgtagtaatttattagcattggtgtgagcatatttttcgctgtatcctgccttaatagcggcatctgtggcgttgccagtcttgacatattcatcggcgaacttcttttgtttaattgttaacttctgctctgccaaaactagcttcacctcctaaaaaaattaaactaatctgcattttatattgacatacgtattaaacacgtgcattataatatgtgaaaggagaaataagatggtaaaaagaagagatgcccttaaagttttaaaggaaaatggctggtggttcgaccgtcatggtcataatcatgatatttataccaacggtcatcattcagaatcaattcctcgccacggtgatcttaacaaagtcacttgggaaaagattatgaagcgaaataatcttaaagggtaaaataaggggcaataccccttattcgtgtaccatcttaaattgttaattatgaaaaaagataaaattgttgtatttccaatcgttataactccaactgatgaccctaaaatcaaatatacggtcaatgttccagaccttgaccgtgatacccaaggaagaactattgcagaagcaattgatatggggaaagatttaatcggaaccatgtcactggtagaagatttacctgaatcaaatgctaaaattcctaaaaccaaaaacaatgaaattgctactttggttactgttaatatttcggaatataagcgaaaaaatgataaccgtgtagtcaaaaagaccttaaccatccctaactatttaaatgaagaaggtaaagaggcagggcttaatttttcagccatcctagcagatggtattaaagctaaattaggaattgagtaatgtttccatctaactttttataattgaaaagattttttgcataaaaaataagcgtcatctctcagcaacgcatatttatattcaattcaatacttttatattattagcggcgctcgaccgcacaagggcgagcgcccttggctctggcgttacgacttgatcgcaacaattatcagaagtataatgatcaaagtaagaataatttctgacaaggctattcacctcctcacttaattacgggaggtgaatagcctttatttgttatatgatcttagtttcgccagagccaaaaagctttaattcagggatgccctgtttttctgcacctgtttttctgctaaacgagtcgtttcttccaccagtaattgatctcttaacttatttttaacttacttgggaagcaagtaattaatatcctcttcactcatgtaatgatttataaaagcagcctttttaaagcgaggatttgtctccatattgtcttttgtcatattccagtcaggcacaaccgtagaaatttgtccatttcttcctttaactaatattctgtttttgctaacacgctttacttcaatttcaccaaattttttatgaatattttcattattatcaaaagctttcgtagctgcctgcctagcctgattacgaaggcggacatatgaagcaccggttttagttgacttaaaagaactcgatctaccacccatgaatatacctactttctttttaagtagtccttatattcttgaacagcagaattaaagcttttctcatatcggtcattcaaatttgaagaaaggtctttaaaacgagaaaattttgctttttccaaattaccggaaccataagacaacgaatagccccattttttaggccctctctaaatcttctaaaatcacactacaaaatttgctaatatgcctattccgtagcatcctcttcaattttttcatatgcctaattttttactccatttgtctaagaattcttgtggttgcatccctgtatcagcgacaaaccaatcaataaattctttatctacgtcattttcaacacaataaatggcgcgttgtattctgcgctctaataatgaccctctaagcggatttttaacgccgcggtatcttctatgtttatgtgccacggcctcacctatggtcttattttcttgtgtcagcgggtgtcttagtccttccatgaatctccatacttttctatgtactcttgtggcatcatgcccgctttttgtttaaacgccacaaatttaatcatgtctactaccttgttgctggtattgtacttaactaaatgttcagcttctttgaccagcttataatgctttctaagctcgtaatacttttctggggtcaattaatcgccctccacgcttaaatcgctgatacgcatgtctaagacgttgaccacggtcatcatcgcattacgctggatcttccacaatttaacctgatagtctgacacgcctagcggattgataatcttgttatcaatctttaataaatcatcttgtaagtgttgtctttcatcagttaacttgctgactaatgtcttattttgcatactttcttgatcctccttatgcaaaaacgtgctctcgtagtcctcaatacttggtactactgatttcggtataggaatgattaattctggttcatcttgcttgatttcagcttctttgatgtcgtcctctggtgggcgatatttcgattcgtgccaaaaaccgcttctttttggtgtagccttgctgttcttttcttcaacccacttggctagcgatttgtctggcttatctggttttttgtgatacatttttactccctggaaacaaaaaaagacatcacacatagcgtggaatgtcttaaatgcttattaaattgaaacagactcactaggattcgaacctagattactggttttggagaccagccgcttgccgcttagcaatgagtctaaaagccacagtacgactgtagttttctaactatatggataacagttagaagggttagaaatgaataaattttgaacttcaaaaagagcatatatttgagcttttgcagcccaatagggagtgtggggctcgaacccacgatccttgcaacgctctaccatctgagctaactccctacctgatcaaatgaggcaagatgcttgcattaagcttttcctcttttacgattccgtgactcttagtcttctctgctttatgtcggaatgcagacgtcctccaccgactttgttcacagaactaacctcaacggtctgtgccgaaatcgaaccgacgtttccgcatagacagtgcggtgccctagacctctggactaacaaaccatttgcacgcctgtgcgtgactaacttaaccatttatgtaagaccggttattgcctcacataattgctttattttatacgtcgctagcttcgaaccgacgataggaatagctggactcgaaccaacaaattacgggaccaaagcccgttgccttaccgttttggctatattcctagttatgcgggtggctattaaccacttgaacttgttaaatcgttgattattcagtcacaagtttaagcaagtcgcaatataaggagcgaccttatatctcttgcttaatttaaatcttggtgaggatttatcctccaactttcacccaacaatgcgattgatggttatgcaaaaacctgtattgtaatttccacgttttgggctactcgtacggcacgtatcagttatacccgcatttctgcggatcatcgtggaccagaattttaacttacatttatctcgtggttccctgacatgtctgccagattagcgtgagactgctttacacggagcgcctaaatctccgccggcaattgtaattctgctgacattgttgcctactttatcaataatttaatgctttctcactcaatcaacgacacctatttccttttcggtgtaggtcaaccaaagctattaccctttggcttgtctgaaattccgtcggtatcccggcagaacgtcgctgtcgatttatagattgaatggcgtgaaccctgtcataggtttatacacacgcttcctcatataagcagtgagggaatccaacccccgcacgtgaccaacttggtcagtgatataccatatctatggttcttggtgcttgcaacattttcaagttaaaaactcaaaagcaccaagttgaaattgttaatgacttaaatttaacgtgcctcaacactgctgctttgacctctgggacacagtcccaaactagacgagtaaaattcaatttattacttatgcaattaataaatatgattattatacttagtgccggttttccacgccggctaagagctagtgaggagttgaacctcaccacaccaggcaattatataaaacgtatgtggcattacaccgaatgctagctcataatgcctcgaatgaggcaaagtgattataaaatttgggatatggaattagaattgccattccgcccgaataaacgggctacaacagcatcaggaatcgaacctggtctagggcgccagccgccgttactggttaattggagttttttaataaatatatggtttattaagactcgtaacaaaaaaaaataagttgttatcgtacttcttactccatcattcgaaaaccctgcttcctaaattttcgacaatactataatatagccatttcactccgcttgtactccgataaaagtccgtttaaactccgtttttattttttcggtaaatgtgaagatctttaaagtaggggatgctataccagtctttccatttttcgaatctgtcagcaaattcacacaaagcttggcgctttttgatgtagtactgactatcttcatagcctagttcctgctgaatcttgtagtcctccatgttgtgcaagtaagcctcagacaagattttttgatatggagttctgccgccatttctacaattttttatagttttgtaaattgctttacatgcttgttctgcttccatgatgcggttaaaacttgactcagtatgatttatcccaccatgcgatgaaacgcctgacgcgtccattttggggctagataggtgtgaatcatcaacaacagacagatcagaaacatttaaacctgcataattttgaaaatgctcaaatttaaacgtaagaaaattcctcacgttatttgcggttgcctttgaatcaacctctaaattatcatctagcgtcatttgctctgctctatctgccattcgtatatcactccgtcattaatcttcccatgtaactgttacctcaacatggggatgcattgaataccatttctccacgctatgcgtaacaattaatttatcgtcttcataaaatccatcttgcagcaccatttttttgtgtagcgctttgtttaatttcatctttgggttcatcccatcaaagattatttttgcgatgttgtcgctatctggcttctttgtggggcgttctttgccttttaagcataattccctacgctttttagaaaagctcttagggataccgaaataggcttttatggacacgccacactgtgagttgattggctcacttatcttgtgttcttttctggcgtaaactgcaaaatatctcacaatatcctcatatcggtgcgtttttgctggtgtataagttctaacaccgccagctctacgaactgtccgcgggcgttccttgctttgtggctcaccaggtattacaaacttgatgcaattaaccgtcattctttcaccagctttgcaatcctctttaaagcattgttaaaatgcttatcatttctgcttcgatagctggacgttttcaagccgcttataagcgttgccagcgccttgatgtcctggtcttgtcttgtctgatcttcaataacaaggtcatgcaactcagtcatttgccttgctatggcattgatagatttagcgttagctacttcacctttctggacttgaattaatgctttttgaagctgatccaagtcttccgacaggagctgttgccttttaaacagaatgtcaaggcttgcattggttgcacgtgagaatcttatattctgacgtatggagataaaaattaaaatcactaatgcaaatgacataatcacattaattattgtcattacttcgtttactactgccatgtaatccctcactttctgctaaaaatcatgtaaacttcgttaggtttaacttttgtcaaatgctttaggtcaaagtctgcattgtgagccaaaatatcttctaatgcgttatcaattgtgggcactactggtgttgtccatccggtctcaacgcactcaatagtcacgtagcttgatccgttaacactcaaaacacgataatgggtgttagttatccagcaatagaggaagtcgcctacttctagttcgtccggactgcaatacagctttttcaagtcattaaatagtttcatttttgtatagctcctttaaatgatccaatttccgtgaaaagtccaaaattgcctccacagtcttagccattttctccacttttaaataaacgctataaatagccatgttatcctcgccatataattcatataagcgaactgcacaaagataaatgcaaatcctatccccttcaattttcacattaaagtcgccatcaattttctttagtttcttttcatcaaacatatagacggataaatgaccggcgcttgcgccacaaagaggacaatgcaagttgtcttctgccgttaaaacatcgtaagtgtctatcgatatatttactccgcaactatcacaatggaacatcatttcatcttgtccatgtccggttaatcttttacagttcataaatcttcaccttcatctctgtcagcaaatcaaacaattcttgtcgatttgtgaaattaatacccgggggcatcaagccgataaccttagcatacggcacatagctagtaagtcattcatcgttattctcccttaacgaccttttttaaatcttcaatgtttttggctctggcttcgttaaatttactcattttgtctatcctctcaattacttatctttatcttgtgtagcgtctttccttaaatctctaccgcaattcgggcaaaaattcggtttcttttctgtcttatacatccctcgattgatgtcaaaggatccatcattatttagcgacaagaagccaccaaacctgccattcttttctctaaatgcatatgcggctcgattcatgtttttaaagtcacagtactcacatggtggctgtactaccttaatcttcgtcatcgttatgctcctttgctgttgccgctagatccaccttttttatatgatcgcagttgttcgctatatctcgggctaaatcgtcaagatttgaataaaaatatttatctagcacgtcgttttcattagttgccctacattgctcatgagtggcattaagtgcaatgagtgtataaggcttttctaagtcttcatagtcatttaatttcgtgaccattaaatagttcttatcaacggacgcatcatcattccaacagcaaattgtgtcattaacatttaattccaataagtcgtttttttctgacttttcaacaattttaatcatgtgttatagctccaatcttttatctgaaattcctgtaaaatctaaacgtctaccgcgtgaatccgataacaagcgactaacgattttagggttatacgcctgttgcaactctttaagcgttaaattagttgtgacgattagcctcttttgcttatcaagaatctgttttaatacgtcctgtttaaattcagttgcttctgttgcctcattctgtcgcatagatgattcactgcccagatcatcaatcactagaacatttacactacccaaaaagttaatagcattctttttagtccaccagctcgttggatcttccatagattcataaatcatgtcaaacatcttactaacgtctataaataggcaagtttgtggtggattgctcttagcatttacgatattaaggattgacattgctaaatggctctttccctcgcctggcgtgccatacatcaacgttgtcatggctttatcagggttatcaattagttcatgggcaattttataagcagcattacccattgaagcctcttgtgatccttttttagccgtgtaattttccaaagacttttctaagtcctctggtctatctaccaagcttctagtacgtaaaatcttagtgaccttgtcatgcataaagcgtttaacttggtcattcttttctttttcagtttgttctttcatacattcaatacaaaatggcttgcctttgcggtctagcaccatttgagttttatgaattggacatacttggtctgctttttcggttttaattgcaattccttctagtccttgcatcattatcaccacctttaaaacggtaaatcatcgtctggaatgtcacttatatttggctcgccaccgtagccgccattagacggctgtttcgcttgatttaagtcattagcattcacataagaatcaaacttagatgcttgaaatagtgtagatggtcgcatatatttccagaacctcgttccttgccatgcatatgcctgattatcaatggcttttttgaagtcttctagcgttgcaccttcctcaaaccgttgtctaattaatttctgataagctttggtttgatagcgtagatgctgattagtttttttattgagataatcaataatttctttgtaagggataggtggttctgcgtcagcagaactatatatatcttctactgttctattagttgttctattattactgttatatttagttgaccgtggtgtcatgggggttgcgacatctgtgccagtacccccctgacactcatttcgccaccctcttgacatatatgtcatgaggtcgtcgccagcacgtatttttcgacctatgattgcaccgttttcactgcttttaatattctctctactaattaattttttctcttcaagaagttcaagatacctattaacagagcgtgaattaacatcaattctttcagctattttcttgttgctcataaagaacgagcctgtgatattcagcattgaaataatatgtcccatcaagataattgacttaggcttttttaaaaggtctttatcttccgcgattgatggtggaatcattaagaatgcttttgcaccagtaaatgctttttgctcttcgctcatatttatgctcctatcttcatgccgtgtgtaacaagatcatttttcttaataaagtcgtacagagctttattcttttcatctttctgtttccaattctcaataaacgctttggcttgcttgtctccactactttcaagacctacaatatcggttaccagttctttgccaccaccatattgagtttttcgcttttttgctatttgaattaattcctgcttggtaattttctccttacgctgtggcgttttttcgtcgttgcttggtaaatcttcaccagcgtaaatgttcaaacccagccccgcaaatgctaacgccttagttaacgcccgcatttgcgttttattaatttcaaagtaagtaacttttttagggtcaagtgccctattgtgaaagtccatgacataaagctttgaactatatgtctcacctttaatagttacgctggcttcaacttcaacgccgtactcagtacgtaagtaatcgtgtgtaccaatctgctgataattaccgtctgctgtttgtgtgtaatatgggtattcccgcagcttataactagcatcggggaaaatactctttaccagaccccaggctttcgcccagcttagataattaagaccattctttttatcaacaaacttagaaacatctacttttgacaagcgctcataaacgctagcgttgtcttttttggcttgttctttcttttcatcctgcaactggtcaactatcttaattagctgatcttttgtcatttctgctagctttgttgcctcagtcatgtttaatctctcctctgtcagattctcgattgagttctgtaactacgtcctcgataagactgttaaataggctctgtgcttgttcttctgccgtagccctataattaccctcgaagtcaactttgaactgcttagcgtactgttttgccttgccataggtcttcatagtgcgacagtcatctagcatctctttgcggatgttgggaatatcggcaatgatgccatctagccattcttgtgcgtcatgcataactgccacctgcttttcctaatgcttgatctaatttttgatcttgcgcttctaaataagcttcattttcgtagtcgtactgattttgaaatgaatcggcatcaataccactaaatgattcacatacccagtccatgagatcatattcatcgactggaacacctaaaagccacgatttaaacatgtctacagcgtcctcatatccaacttttttagcaaagtcttctgcaccatattcctcgaaataggcgttcataaaagcaaagacattctcatagccaatgcctttgccgattgctacacgttcaccgtgtacgtcttgcaaaataacgccgtcaacttcttgtaagttccgtaaatcactatcatcaaactcaatcattgtgttataatctcctttagatattgttttttatttcgttgctctcaacattagccgttgagggcttttttgatacctaaaatcttcttgacttctactggcataaccgcaaaactagaaccgccaacgccgctaatagcgttactgttagccacaaggataagctggctctcgctgtacttacctgctctttgatacgccacaccgaattgatgaacctgtaccatagcttcattagtcctccttaaatcctgttaatagccagtcaactttcacgcccagaaaatgagcgatctcgctaagtcgtcttttacttggaaaagacaacccattttcataccggctaatcgttgtcatgcttgtaccaattctttcagccagctgtaattgtgttagctggcgattttttctagcgcgcattagtcgcatgccaaaaagcttagcttgcattattatcacttctttcttaactttttaacggcacgcaccgacagcgctgtgagaatgatcatcaagaccagcagcagtgaaataatttggtcgggatgcgttacgccgtagatgcatagctgctctacaatcgcaaatggtaaaaatagaattgccatgaattccaggattttaccgaatgcaatggtcatatggcttagcacgtggtcaagctttgtcttgccgtattctctttcgtattcctttttagtcatcttgtaacccctttaatcctttcattagagcgtccatcatcaatggagcggcttcatccttaggcattttttcaatctgctcacgcatttcgtcggttagatgctggattaccccccctaaaacgaacggattaccatactcaaattcacctaaattacttccatttgcgacgcacataataattgcgctgtcttcatcaaccttgctaaacagttttgcaacttgcttagacatcttttcttttgaaaattcagtatctttgttcatttctttttctccttaaagtcttgctttctttaaatagtctttcccgtcttccgcgaacctatccaggtcttcgcgcaagtaatatctcgttctgccgtcacctggcaggctcggattgataaatccccgctttaccgcgttatcaaagtacgagccacttacaccaagatagtgatatgcatctttgcggctgaacattttttgatcggtaatttctccgcgctttgctagctcttctctgacaccttcacgaactcgcttagcaataaatctttctaattcttcttcgttaatgctcagaagagccatatacctcacctgctttctgttacaattgagtcatctccaataaaggaggtgattttaatgaataaactgcattatcctgaatgccaatcagtaaatgttaagccgattgcaattggcaaaggtccaacaacttttgccttagttgtaatgagaaaagacaatcttattggcggatcactgtacgtaaatttaattcgttgcaccgattgtggattcacttggcttaaactaactgataaaagcactgagtttattaataatcatcaggattaaagttaagttcttgacccaaagctgataagcgctgcttgtcagcttttttgatttcatctctaacaatttctttaattacttcaatttgttgttcagtgaaaatcttgtctttgttcatctcagcccctccttattcgatgtcactgcgttcaatcaaggggcaaaacatcgttatcttttaaaatgtcataaatcagctttctgcctttttgcgtccaatacgttgatggctttgatctggttctgcctttatgatctataaaggtaaacggcttagttgttacatagccttgacccatgtaaaccttgtataaaatccattgaccgttaactttatgctgaattcttaccttgtgaagcaattcgttgaagtccttagcgttataaccgtagtctgccgcaatttgcgtaaccgccaatgcgtctggcgctccaagaatcacatctaagtaactagccttcttattggcttcctccaactggattgttaagttctttttctccaatttcagttgtgtgttttcattttgaagaatggcgtaaccacgcttaacaatctcttgtggatcattccacttgcgttcaacttcaattaaatacttgcggtattgcttgcctttttcagtgcggctcatgagacagagctgtttcgccatgtcaatggttaaggcatagtcctgaattggctttctagcgccattattaacaaccgtagttgaaactacgctcgtaaaatcttgttcttcatcaaaatctttgaaattttggcttacccaaaggctaaatctcgttttaatagcaagtcctttatgcaaatctcttgcgctaacaagttgctgatcattgttaacagttaccttgattagttcttgcatgtttcttcgcctccatcttcttttctactaaatcaatcacttcataaatcttgtttgataagtctgcatccctcgttaaaagacctaattgaaagagtttttcacgaatcttttcaagttcatcaagacttaaagcttcaatttctttgttcattgtcattcgctcttgttttctttaatccgaacctttcacttaaaaataaaatccatcggaatttgatagatttttgacatcttttttgcaagccccaaggtgattttatcctcatcgttttctaaatttgacagattctgataagaaacacctaatttagctgctgcttctcttagggttaaatctgcattaaccctagctgcctttgcggtgatttttggcatcttgcaccttctttactagctctttatgttcttttctggctttcaatagtcgtaaatgatagtaaagccaaaaaaagaataatccagcaattacgattaacgctactgcctcaattgcattcatggtgtcacctaactataattgaaagtatgctaagcgggcggctcgcccgcctagcagttggttaacgatcttcctcaagctcacgcctgagtttttcgttttgtagctcttggtttatcgctttggctctttcaagtcgcaccttgtagaagccgtatgctaagccaagggctattattatgctttcaatcataatatctttcctttctttaatgttaaggtcttgatcaaccttacataaatataatagttcattttaaaccgaacgtcaacacttttttcaaaataaattgaacttttttccaccttgtgcgaacatataattaataatatatagaaggagttcaattatggcacgaggagaatcaacaccattagataaagaaaataaaaatattgtatccaacaatctagtcgaaattgctcgatccaaaaatttacgtcaagcggatattgtccgtttaagtgggttagctaaatctacaataaatggatattttaaaggaatatccttacctaccgaaactaatttgcttaaattatcaaaggctttaaatgtatctcctgccgacattgatccaagatatagcaataacaaacctactaataaatactctgatgctgacttagatgaaatgatagataacgcacactcttacgatggtaaaccggtagacgatcatgaccgcgctctgataaagcaatacttaaaggctctttttagcaacaagtaaggtgattctatggacagtcatttaaaacgtctattaaagaaatacaacttaaaaatacagtttggtcccactcatggagatggctgcatagtagaaacacctgacggctaccctaaccttttagttgttaaggaaggtctttcagacgaacaaatggaaaaagttatacttcatgaacttggtcatgctgaaaatgatgacgccacagaaaaaaactacaagactgattatgctacccgattatcatgtgaaagtggtgcaaatagctttgtagtccacgaacagataaaaaagtatattgatctgggcaatgatgcgtcaaacgcaaattggttaagtctggctaagtacataggcactgataactattgcctagttcaggaagaattattgaaatactgtattaattaaggaatataaatatggctataatttttataattttgttagctattacaatatgggtgactcttaaatacatatctctgaaaaaagaaaacaaagaattaaatgagaaaattatctttttaaagtctcagcttaaaaaaagtaagacatccatttttcggaaaaatcaaaacgatgctacacatattgatcaacactctgttttatctaaaaatgtatcgagtacaaatagtaaagaaaaagaatcagaaagtgttaatacatcaaactggtctgtaaccaccgaaaacgggattgaaattcctgtatcaatgaccatagagacgggtgccaatgatgcagactataatcatgaaaataatagatctctccaagaatatcaaaatatttgtgagtcacgtcctgattacaatgatcaatttggtagaccatttgactaccccaaatatactgataaatataatactaatactgacttcgttttgcgtgaattgcttttacttgtttggtggggcaaagttaaaaaaggtcgactaaccacagctagaatccccaaatattttatttatgactacaacctaaacagtcataaagttactcaaaaatttattgataaaggactactacgcatcgaaaatgatcgttatgtactgtctgatgaagcaaagagaataatcaacttttatagtgaattatgggaaatgcatcagactactggcatccctatctgcttagatgaagattttactaattggaatcacggcaaattacttgcaactttttatcaaaaagaaattgaatatttttataagatgataactttttacaaaaaattgattgttttctataaaaagcatcctaatttttataatgataagttatttataaagcataaaattcaagatttaaatgaatcaatttcagatattgaaaatgatattgccaaagatcaacaacgcattcaagcatacaaataacttatatatagtccacaacaccagtgactataaacctatggcaatatctattttggaggaatacaacatggcaggatttcgaaagccatctgcaaaaaagtcttttagtgctagaacaactggcagaattaaccgctctgtaaagcgcgcaactaatccgttctatggcaaaaaaggcactggctttataaaagacccggaaagaagtattaaaaattctatttatcataaaactacaactggtggatttagttccattaaaagtagcaaaacagaacagtcagatgatctatcagctgatgaatgggttaaagtcatcttattttttatcgttgtctttatagttggtggatttattggagttactttcttctaagcaaaataaaagccgcccgaaggcggcagaaaggatgtgaagttaatgaacaacaaatatcacatcaatcttttatcatttaatcttctaaataaagagcagaaagaaatctattcttttcaaataatcaagactagtttttccgaatgcagctgcaaatttgtcgtttatttagatcaaagatttcaagcagcattaaatgatgatcagggtttcttttacttatcggctttttcaatagaaaatcagcctttgatttttgaacagatagactttaggctttcgaagctccctaaaagtggattagtagaaatcactttcaaaataaacattcctatccatttagatagttctgctttccctgataagaagattacttatcctaaagataaagttaaattgcgattatcttttagcactaaagacgttggagacccattctttcatcaagacttagaggaaggtacttttattagtaccacaattccaataaaagaggcggactctaatgaatgataaaattttgaaattgcatgaagctaaaccaataaacactgatagcttgtctaccccacataagaaggataatattggtggaggtgagccaccaatgtcaaatgacaaatacgtaacacatgaagaactaaaccatgcagttgataagttagatgccaagattgatctttcaactgaaaaattaatgcaccacgttgatgataaattcaatgaaagtaaggtcgatctaactaataaatttagtaaaaatcaaagtgaaattactagtttgaaaagagatcttaaatcaaacagtgacaaacttgcgtggattgtaggaattttatcacctatattaactgcagttatattaaagctattacaccttagttaattttagtagttcttgatgtatgcattatcaagagctatttttatgtttaacttttacaacagagtccataacaccagtgaccataaacctacggcaatatctatttttggaggatatagataatgaaacataaatacttgatggttgctttatcagctgtaatgctgtctggtgggattggtgcagcaagtgcctcgtctgcttccgccgcagttcattcaattaactcttctttctggaataagaatagaaaagttatggtagataaaacaactatattcagaaagtttgataagaaacgcaataaatatgttcatggcactaagaaatatacacctggcgatgttatcagagtaagagcggctggtgaatttaaaggctgggtattggccggaactcgtccaggtagtcgctactggtggatcagtaccaagaaaaatagtagttggatggatgagtattttaaagagcatgaagaaaaatggagcggtaagacatttactgacatgtatggcaataagtttactgtaaaaaagcttcaacgtgtttcagtcatgaattatgacaatgaaactggaaagccagatgaagtcgacttggttctatctggtaagtttagtaacaactactacaagaaagaaagccctaagagctggttagatgaaaacttatttatatatcctaccggtgccaacaaggaccagatgcttttagatgatactggcaatgaggacttaatgcttcctaacgatgaagaacatagtgatgactttgcagagcataatgacaagctgcccaaaggctattacaccaactttaaaatggttcttactggggataaacaggatttaaatgctaagagttacacctttgatgacgatgccggacataaaatcgatattccagttgaagatgcaaccgtagaggtagacattgaagattaatttaatagcaatcgaggcagatcatgaaacatagagttttagttactgcattagcatctattatgttgttgagcggcacaagtgcatctttggctagtactgcacagccagtgcaagccatcagcaagtactcacaccgctggcactgggtaaaggtcactaaggaaacaccaatttataaggtcaaggttggacattatatgtatcaaagtaagttaactcataagacttacattgagaaaggatcagacttgaaggttatgtattccggtcatgactacccttggcgtgtatatgctggctggcgtggtcactgggttgcattaagacaatcagctaactggttcagaaactaagataaaacaaaaaagcctgcctaccctttcaggtaaacgggctttaattatacgattttaaagaacaccagtttaattttagtgtaaaaaaagaagcatcaaatcgacacttcttttcatcggatgcatccctagaaattaaagctcttggggcgcccgctccttcatgatttactaccatcctccagtgtaacgcaagcaagcttgcgttttgctcacacctacggaggtgtaaatcatggaagaaataatattcgcaatgattattttacttcttttgattcacgagatcaacaagaagtaatctaacccgcgggcgccccatgcgcgttcgtgccgagcgcgcatcatcaaaaaaattagaaaggaatgataattatgccgagaaagaaagaccctgagatcacagagtataaattaaaaaacgggaaaaagttttttcgtcttagaacttacattggcatcagccctgaaactggcaaggctatcaaagtaactcgtagcaaactaaagtctcgcaaggaagccgaagaagtacgtagagaactgaaagctcaaggaccaggtactatacggaagaaactggaaacgaagcaaaaaaagattaccgttagagacgcttataatgcttggcttgaagtaatgagaaatgatgtccgcagctctacaattaggcgaatcaaggaaacatggaaaaaccaaattgagccagaatttggcaatacctacattagcaatatatcgccagatcatgtacagaaatatgttaacaacttagcttctaaatatgttgcttataaaataatggctaatcagctgcatagaattatcaaatacgctatttttcgtcactggtgcgacaaagatccttttgactttgtaataatgccaaaaaaatcagcaatagctagtagagacaatacacttaacttttacgaactagatgaactcaaacgctttttagatgtgactaagaaatttagcccaatgacatatacatattttctcacagttgcatctctaggatgccgtcgtggtgaagctttcgcacttaactggtcagatattgattttgacaagcgcactgtcaaaatcgagcgcacagttgcaatagatgaaaatgacaagaaaacaattgatgatgtgaaaaacggtatacatcatacagtccctatgtctgatcatctttatacagctttgaaagaatatcaaaattattgtcataaaattggtgacaactgtccaatgccttttcataccaaaaaaggtgattatatgtggtcatcgcaatctgatacatggataagagcaatatacagatacgatgctaaccaatgtaaagaatggaatgacaagcatcctcaagatgagaaaaaaccattgcgcaaaattacgccacacggtctacgtcatacacttgctacactgctttacgatggcacaaatggaatcaccccgaaagatattcaattcgttttaggacataaaacacctaggacagcaatgaggatctatacccatgttaccgagaaacagaaaaaaggtattaagagttcgatcaataatttaaacttttaaagaagtattacgtagattttacgtaaaaaccaaaaaagcgcacttatgaagccttcataaatggcgctattctggtaatattggcatatttattttgttttatcttgtaacataattatttattttctaatttcttttttaattcttctctagtaaccttttcaactttgacaggaatcgtttgaaggaactcttgaccataatctttagtccataatcttgggtctaaaattacaaattgaccatgatcctgttctcctctaattaaacggcccattccttgtctaaaacgaatgacagctcttggtaaactatctttagtaaaagaatcgattccctgatcttccaatttcttctgccttaaacgaacttcaggttgatcaggagattcaaacgggatttttgccgcaaaaacagtatcaatcccacaatcatgaaaatcaattccctcccaaaaactatcagcaccaattataattgactttttagcaattacaaacctcttagcaattcggttattggaaccagacaatccctgggctaagatttcaaaatcttttagctgtggctcattcataatcatggtaaaaacagttttaattttttctaaattagtcatcaaaacaagtacatggtgcttatcttgaatgtcactaagtaaaatttgtgcaatagtcttttcaaattcttcactatcagggctaggcatattattaactgccagtacctgtaaatgcttttttatattaaaagtacttttaccaatatattcaaccggatgtaattctgttaaagctaactggttgattgcatattcaaaatttcgattactggttaaagtagcactgacgaaggcaatatggtcaaaacgactatagatttgttttaatacttcaccagcatcaagcattaaccagtctaaattggtacttagtggatcatcaagattagtaatcatcaaaataaagccatcttgctctaaacctttttgatcagaaagcaaatcagccaattgatagcccttttcagagtaataatctaggcgatcaatttgttccgtaatctcattgactaatacctcaacattagccagcatgcgttcttgttcattatataattcaaataaaacctgattagttaagtccctaacctcttctaatttttgttggaacttaggtaaaatcgctttaaacttgctatttccgccaaataaactttttccttgaaaactaagttctagattaccattagctaaaactgtccgattaacagcattatctctttgaaaataaagttgcttttgtaattcattaattaactgaattaattccaaaattttaggatctattttctttagtaaaaggttcagctgcacatcatcattaaattgcgcttcaacactttcatctgagaaataaagcaaattacggagatgacttaaaactccccacaaagcttcaaaacgcaaagaatcattacgcgaacttacgacattgtctgtgaaacgatgagcttcatcaatgactaaatacggattctgaccccaaattgtatccatatagtggttagccaaataagcatgattagtcaccaatatatccgcttcttcttgtcgtttacgcgctaaattccaaaaatcgacccctgcaaaacggctacctactcttgcatcccctggatgttgaatctgtgcaaagagtggtgcattatagttagttaaatttaattcatctaaatcaccagttttagtcttagtcagccaaaccagtatctgcatctgtaatatcaaggtttgcttattcggtgtaccttgaaaaatcgtctgtacaaatccgtcaaggtcaaggtaacgactacttgacttaactacttctgcagtcaaatccaacttaatcaccttaaataactgcggaatttcatgttcaatcacttgttcttgcaacactttagttggtgtagctacaactaattttctaccagaataaagctgataagcataagaaaaaagataagaaaaagttttcccagtcccgttaggtgcttcaattagcatcgcccttttatctggatcattaataaactgatgcaaatgattaattaggtcgacttgagctctacgaaagtgtaaatgatctttaaatagcttttgtttctctgagtcagtctttgggaatttagcattcccaccatgtgcttcagaattatcattttgtttttgcagaataatattacgcacttgcatatattctttacctaaaggccgtttttcttgacgtaaattatctgcaatcgttgtaatcacccaagaggtatcccgaataagcccatgagataatgaactgagggtattcagtgtagcttgaggtagactttctaatttattaaaaatttcaagcaataaaactgcagtcccataagcatcagaatctgccttatgtggatctaaatgtttaatccccaattgtgttgtcaaatcactcaacttataagatggaaaagtcggaaaagcaatcttagccagttctacagtatcaattgctttatttgtaagtgcctcataaccatgttgcactagttcataattcaaaaaaggcaaatcaaagtcaacattatgagctacgaaaacagtattttgcaaaattttagtaattttgggtgcataataatcaaaatctctttgttttgctacatcttgatcatgaattccggttaaattaacaactgattgtggtatttcacgatgcggattgatcaaaaatgaataagttttaactaccttgagatttttaataatagcacacccaaactgaataatatgatgcccattctcacgttgcgttcctgtagtctctagatcaactacagcaaatgtatctttagtaaaactttttgccataatttcctccttcctctatttcacttcaaccgcttgtttagcatcaagcagaattaaatattttccaataacttttttttgactaaattcattgatagcttgttcatatagtctaagctgacctgtatatttttctttaatcaattcaattgattcagataaatgcgattgatcaacgtggtcagttttgtagtcaaacaaaataataccatcatttttgacaaaatagccatcaattgtaccatgaaccaaaattttggcattaggatctgaaaagtttttaaacaaagttttagcggagattaaactagaaaaatctatttctcgctttaaattctctggcttttgccaaaattcctcggcaaaattgctatgaacaaaccactcaatttggtctttctttaaactagaaacaatttctggattcagtttcttttgcttaatcaattcttgaatttctacttctagttgatcttcagcaccattgccttgataatcataatactgcaaaatcatgtgtgtagcagttccgatttctgcaccagtaaacttagtttgatacaagaaattaggtttagtatcaatcggttgtaaataacgattagtcgatgtcaataagtgggcattctctaattcggtctcgatcggatcgttgaatgctttttttatttcagataccgcttggtaagctgtagtttcactagcatctttaaacggataattaaattgataaagccgtttagtggtttgatttaaaaggttactttgcgttttatcattacttgcctccgctttctgataatcaggtagttcaccgttagcattttcataattaatatataaaaacgactgactcttatccaacgaattagtaatatcagacattttcacagctaggtgtcgatctaaagccaacgcaggtcccataaaactcaatggactagtggaagataacttatctgctaatgataattgaccaatctgatttagttcagtcgaccattctttaactcgtttatccagattaggaacatcgccaaccaaaattaatttctgcttagcccgcgttaatgctacataaagaattcgcgcttcttcttctaataattgcctttttttagttacatttcccatcgctttaactaaagagtcaatccgataatgttcttcacggagcgtaattcctatactatctgagctaatcacatagttaccttttaaatcacgcatttgatatttatgctgcatccccacataaaacacgatcggaaattctagtcccttagaaccatgaatagtcattaatctgaccgcattaccagcttctttagttaataaaggctgtgccaagtccttctgactttgccgcatccgattaataaaattgataaattggtataatcccttgaaccctgcactctcatatgaagcagcacgttcatataaagcttctagattaactcgtcgctgttcaccattaggtagtgcggtcattatctctaataaatttgtcctagcataaatgctccaaatcaattcagaaatacgatgtgccgtggcaaacttgcgcaaatcagctagttgatttaaaaaatctttgattcgagtacttaattcatctcctacacctacataagaagtcaatgcactatagaaagtagagttcttactcttgatacgaattttagctaaatccttttcaccaaaattaaacaaaggcgaacgtaaaactgaaactaatggaatatcctgatcgggattatcaatgatctttaagtagttcatcataacagtcaattcaaaagtttgaaaataattcttcgcatcagttacaaataatggtatatcctgcttagcaaattcctgcattatttccaaattatcactacgacttctagtcaagatagcaatatcactgtaacgtaactctctcattcctgttttactatcaaagatttgtacacgctcttcttttagttgcttaatacgtgctaaaaccatttgaatttcagaaaaatctatctcattttcatcttcattactgctatttttcttttcatgaacaattacttcactagctttaggagtgttttcaggataatacttagcaccaaaaattaattgtccttctttttgatagtcaatcccgccaaaatctgaacttagcacacttttaaatacttgatttacaattttggtaaccggctcagtagagcggaaattatctgacaacagaattcttttggtttgtttattatcatcattggcaaaatcatggtattttttcaaaaataagcttggctctgcttgtctaaagccatagatcgactgctttacatcaccaaccatgaaaagcgtatttttatctttatttttgatttgctggatgatattttcttgcaaagcattaatatcctgatattcatcaatcaaaatctctttgaatttattttgataaaattcacgagccatttgagaattcgatgtatcttgactcaaaatctgataagccaattgttccatatcactatagtcaagcaaattttcactgcgcttcagcttattaaaccaatcaatcaaggctagctcggatttagcaattgcagcaacaatcttttggccgcgctgcatgactttaatttgttcttgttcatcaacagcaaaaaatgaagtaaaagtatcaaaaaccaaattttttgcttcatcttttaacttttgtaggtcttcataaaaatttagaacatcttcatcccatttacttgacttacgataattcgctgtaaaaacacacgaacgtaatagttttcgttgtttatcgtagtctgcatcattttctaaagcaaaaacaaaatgatctaaattttgtgcaaacaaggtaaaagcttccttagccttagctagctcttttgtttctattactggattttctaaataatcattaattttcccttgtaagtcgccaatactagtaagcaagtatggcttaatctgtttttgccacaaatcagattccacgatactgccattaaccacgtaaacatcaaccaatttttttaaccatgagcgatactcaggtttggccatggcaaaatcatacaaatccagcaacaagtcgcgcggactatccgcatctctatcccctgcaaagttatcataaaaatgcctaaaatttacgtctttcttttctagaaactccccttcaatttcacgtaatgcacgttcttttaacaatgcagcttgagtatcatcagttagaatactaaaacttggatctaagtttacagagtaataaaagcgatggattacttctagacaaaatgcatcaattgtagaaatattagcagtatccacttgatttagctgctcacgtaaatatctgcgattagatcccggctttgctaattcagctgataatgcctgtttaattctagttttcatttcttcagctgctgctttggtaaatgtaattactaataattcatcaacttgggttcccgaaagaatctcccttaaaacgcgctcaacaagaacagttgtcttaccactacccgcagaagcagaaaccagaatatcatgaccacgatcatcaattgcttgttgttgctctttagtaaattgagacaattttattgttcctttcctaatttctctttgattttaagaattaattcttttttattcagattgtttatttcatgatattgattttgacgcagcatcgcatcaaaaaagaagacatcacgataatcagaataagttaaggcattcttcgctttgccataacgatatggattaagttcaatttttccagataaaatttggcttgatgcttgtcgaataagatactcatcgtattctagcagtaattcaatttcttcctcactaaagttgcggtcacgtggcaagctaaagccacctctagccttagttttaaccccagtatacagttcagaagaatagctaggatgatcatcaagtaatggctcagcttctactaagatttctggatcattgctgattaagccagtatacatcagcttgggcttactatcagttgctccctttttcaaatttaaactactatcaattagtttattgctattcaaacgttctaattgtctagtaacagtttgataaaaagcacccaataatgaaagacgatcttttccagcaaaaaattgatcatttttagtcaaaacatccaaataagaaaccatctgtaaagcaattccgttataaaacatcccaagatcaaattttttagctgatgacttgtaatcaataacctgggctaaaacttgatccttatcattgaaattggccaaatcaacccggtccattttaccgcgcaaatcaactttatgttgacctgatatatctggcacttttaagcttaatcctttgattttttcacctaacccaaaacttaattcagaatacttagcccgtaacggggtttccttcaaggagcgccgccaattatgagctaccttagaagtagtatggtctagacacttgaaaagatattgattaaaaggatcattcattaattgagaatattttccttcatccttcatcacatttcgcaccgaattaagcatttgttccagttctatgctgcttaaatctgctaagtcggtatgctgcttgtttagttttttcactaaacggtcaaaagtctcgtgaaaatagtttccagcctgaataacatcaaattcattttcaaaccgtcgccgcagcttaagcccataattcaagaaatattcatatgaattttcataaaaagtttccagttgtgacacagatgaattcaagttttgaccatacaattgactagccaagtcctgaccaatattttctggctggttatcaaaatcacttgcttcaagcactgtcttcgttttttgaggtagttgctcctgtgtgatttttaataactcttgcacagcaagacctgaatttattgaattcatataggttaaatagcctaaacttgcatcagggttagtaatgaaagacaaaagatcctgcatcttttctggcaaatcatgttgaacaaattgctgagcaccataatcctttaaacgttgataataaattgaaggatcaagctcttcatttgaagcattaagtactggataagatacatataccctatcttgtgctaaagctagcgacaaaccaaactgataattttggtctaagttattaagctgttgactatcttctaagtaagattctgaattaaaactattttgtagctgattcaagttttcagtagttaaaaaacctggcattttctgaatttggggtaaattattagcagtagcgccaatgataaacacttgcttatagccgctagtttgtaccatccccatttcagaaaggtttaccgcatcaagtgttgaaggaatttgggaaaaatttgcttctcggaaagcgctaattaacatattaaagaattcatttaaatcaaaagtttcaggattaattgctaaatagtcttgcaacagctgcattaataaatcccataattgctctggttgctgcgcctgctgtaaatcaccggcttcattggcctcatcacgccatttttctaatcggtcggcaattccgttcttagttaagaactcaaaaaatatcgttaacgccttttgactatctttttcttgctctattattttgaaaaatgttgaaatcttatcaaccaagtagctgcgcaaacgatcgatcttagctacttcatcatccattttgtctaagcggatcacttcagcattcacaaaattatcaaagtgttttttccataaattatgattaataccatgagccagaacaaaattctctagttcatcaacatcatgaatatactccgcctcttccttataccaagaaggtattaacaagtgtgtctttaggatggctagcatattttgtgtttgaaacggattctcatgtaagttaaataagctttcaattaaaacaaccagaggatgatacttcatttcctgttgtaaatcattaaaaaatggaatctgattttgacgtaaaattggcgtcaaataagtctcgtattcctttaaatttggagctaaaatcaaaaaatcatgatagcgatagttgcttagtgctacctgttgataaatagtccgcgctacaaaataagcctctgcatatcgagagtctgctttaactaattgtacctgcttcaattcgtcaactttaggaattgtctccgtccaaagactatttaatatttcacgaccatttgattgcgaattaagcggaaaagttgctgtcacgtagtccatctttctctcttgtaagaacagcgttaagcgcttaatagtttgctggattacataatcataatctccttcttccgcactagaattaatttcacctaagcgcgttttaaatgcaaggattacatcttttgctttacgcatcaaaattttaatcgttagtgtttcctgtaatgaaaaatgtgaaaaatcacagaaataaaaactggcttgctttaaatttttacttttagctaaaatttcatttagttgcagctgaacctcattcttagtagagaatttacccgcaatttctttaataaaggcatcatagataatccgcaaatcatgtaatttatttttagtttcttgatctaaattatcctctgatatctcgtctaaatctaaatttccgtcatagacttgcaaaattgtctgataaagctgatttactaatccagaattaacattaacattttcaaaaatagtcaattcatcttttttgttctcaataatatgagctaagagcattgcactagctgcatcatctagttgattaggcaatccttgctcggcatcttttaagaaaaaccaagctaaacgcgaaaaagacaaaacatgcaaatttttaactgcagtctcagtttgttgtttgcttgttgctaatttgttaattgccctaacttctgtggtaaacttaatatgattaggaacgatgataaaagtttcttgttctgggtgttgctgatagttttcaactgcttcttccagaattttttcttgtaatgggtcggtttgtcgtcctgtaagaattttgatcatttgttcgcactccttgctttttattttatcatagcaagggcaatcttttgtataaatctagtttaaggatgattaaaaatgaaaagcagctatttagctcatggcaaggtaattattattggggagcattcagtagtttatggatatgatgctttagctatgccaattaaggctttacacattaaaactactgttgaatctgcttctcaaatgtggatggataccgctcgctaccacggtccattatttgaagcaccggcagaatatgatggcctaaaatacgtagttaaacatatgcaaaaaaaggctggcaataaccatccacttaaaattacatacactggtgaaattccaatggaacatggttttggttcaagtgctactgttgcattaggtaccactagggcaatgaaccaattctttcagctgaatatgactgaaaaagaaattatgactgtaactaatcatgctgaaatgatcaatcatggtaaagcttctggtcttgatgcagccactgttaattcagattatctagttttttttaataaaaaaatggggcctaaaatattacaaaccaaattaggagctaccctgttaatcatggatactggtcaactaggcaatacaaaggaagctgtttttttagttaaaaaaatgcttgaaaagtccgactatgccaagaaaaaaatagctcgcttgggtgaattagcggatcttactaaaaaagcttggatcaagcacgatcgtcaagcagttggacagatttttaatgaagcacaagaaattttgcactcatttgatctttcaacaaataaaattgaccaactgcaaaaaattgccttgtcaaataacgctttaggctttaaattatcaggcggaggtcttggcggcattactatttccttgtgcgataacgaaactgtcgcccaagaaattgcctctaaatgtaaagatttaattagtgactactggattgaggagatttaatgaatagaaccgcacgagcacatacaaacattgctttaatcaagtactggggcaaagctgacgacaaattacgtcttcctttaatgtctagtttatcaatgactttagatgctttttatactgatactagcgttgaaaaaacagatggtgaaaatcaatttttcttaaataatcaacagcaaactgctgcagctagtcaacgtgtttttgcttatctaaaaaaattgcaggctcgttttcacgtcactggcaatttaatcgttaaatctgtcaatcacgtccctacttctgcaggattagcatcatctagttctgcttttgcggcactagctgctgctttttgtcaatgctatgacatcaacattgatctagaagatttatctcgtttagccaggattggatctggttctgccagccgctccgtttatggcggttttgctgtttggcaaaaaggtaatagcgacgaaacatcttacgcatatgcactagatgaaacaccaacgatggatcttcaccttttagcagttgaattaaataccaaacaaaaaaagatttcttcgacttatggtatgaaagatgcccaatcttctccatttttcaggccctggcttgaacgcaacaattcagaattaaatgaaatgatcaaagctataaaaagtaatgatttcactgccctaggccagttagctgagttaaatgcaaatgaaatgcatgcaattaatttaactgcacagcctgaattcacttactttgagccgcaaaccattcaagctattaaattagttgaacaacttcgtactgaaggaattgaatgttactatacaattgatgcaggaccaaatattaaggtactttgccaattaagaaatagcaaagatatcattcaacgcttttcgtccgaatttaataatgttaatatagtgaatgcaagttttggtcctggaattacttatttggactagttgtaattaaaaaagttaattagattcgaggatttagttcttttgataacagaaaaagcgcccggaaagttatatattgccggagaatatgcagtattagagcaagattgtcctgctattttagtagcagttaaccaatttgtacgtgtgtcaatcactaagagtaaaggggcaactggcttaattcactccaagcaatactcacaggattcgattcattgggttcgtcagggctcaaaaatggtaatcgataatcgtgacaacccttttgaatatattttgtcagctatttcatttactgaacaatattgtattgagcaaaatatcaagatgaaagtctatgatttacacgtcaattcagacttagattctgcagatggtaaaaaatatggtttaggttcaagtgcagccgtcacagtagctacagttaaagctatcttgcgtttttatggcgtaaaaatgagcaatgaactggtttataaattatcggctatttcacactattcagttcaaggaaatggctcagctggtgacattgcagctagtgtctatggcggctggttagcttaccaaacttttgacaaaaaatggttaaagcaagaattagctaataagactttagttcaagtcgttaatgaagcttggcctggcttaaaagttgaattactaactcctcctaaagatatgaaactgatgattggttggagtcaaaagccagcatcaacttcacgcctcgttgatgaaactaacgctaataaggcggctttgaatatggaatataaaaatttcttagcagcttctagagcttgtgttttaaagatggttcaaggtttcgaagcaaacaatattgctttaatcaaacaacaaattcgggctaaccgtaaattgttgcagcactttgccaaaattaaccaaattgccattgaaattccacgtttatcgcaattaatcaaaattgcagaaaattttggtggagctgctaaaacttctggtgctggtaatggtgactgtggcattgtgattacagatgctaataccgatgttgaagcacttgaaagcgaatggcgccataatggaattatgcctcttaattttaaggttcaccagattatcatggctcattgatggagagttctatgtcgattagatctgaaagaaaagaagaacatctgaagttagctcagatgttttttaataaagaaaaatataatagttttgatcaactgcatttgttgcgccctgctctgcctgaaacaaaagtcgatccaactattctgggatcagaaatgtttggcaaaaatgtttctgcgcctttttttatcaatgctatgactggtggctcagctgcttctaaacaaattaatcaagcattgggacaggttgcccagcagcaaaatattgccctagctttgggatctgccagcattttagctaaggaaactgatcaactagacagttttatggttgccagagcagaagatccagatggtgtactaattgttaatgttaatccagaaacaccaatctctgcaattaaacaaattatccaagaattaaatgcagatgcgcttcagatccatttaaatacaatacaagaaattgccatgcctgaaggtgatcgtgactttcgttggcttgattcaattaaagcaattcgtaccgctatcgatttgcccattattattaaagaagtcggttttggattggatcaaacaagtattcatcttttaaaagtaaatggcattgaatacttcgatgtcgccggttcgggtggcacaaactttgcccagattgagaatgcacgtaatgccagtgacgtttcatacttagaagatttaggtttacctactgtggtgactgctctgatggcatggcaagagcaagttaaattttatgtttctggtggagtacgtaatcccctagatattttaaaaggtttagctctaggaggaaaatttgttggtatttcaaatgtttttttacaagaatacatccaaaatggtagtactggattagagcaattaattactaattggaaaaatgaattggctgctttaattgctgtttacggcaaaaaagatttagcatccctggtacaaataaaaaaatactataatttaccattaaaggctcaaatcgatcagttactgtaaagtaaaagcactagttaatgattactagtgcttttactttacataattttccttatttaatttcaagcaatttagcaatttctttttgaacagcactttcattacttgaaccaataatttgccctgcagcttgtttggcttctggcaacgccgttgcagtagcaaaactacggcctacatatttcagcattcctacatcattaccgctatcgccaaaagctatcatctcacttgatttgatccctaatttttgactcaaatatgctagacctactgccttattcattcccttagtttgcatatcaatcgagtctgctgcaccagaaacaaaaccaacctccggatatttttcttttaattcgcgcaaaattttagacattttatcttctggcactgtcagactgaccttgaaaatctgatcatcaatttctccaaaagaatctactacagtaatatgctccatgtattttttcatttcttgtttataagctcgtccactgctctttttaacataagcacttactagccccatcactacagctggatatggatattcagtagttatttttaataaagtttgatatatgtcatcacttaacgagtcaacatgcaaaatttgtcttccttgagcaactaatgccccattttcagctacaaaataaattttatccaaaacctcaggaaaacgagtcattaagttagcatattgattgccactagcaactacaaatttaatcccctgcttttgcatttccgcaaattcacgcaaaaataattctttatcatagtctttctggtcagttaaccaggttccgtccatatctgtcgcaattagttttatcattttctcaatccctttgggtaaaagttcttcaatacttgattaccagcgattttgccaaaactaaatattaatttttgatagctgactaacacaaagccccgcaaatcactgtccactttaacggtttcaccgtgcaaataattttggtattcttcaattgtcggtaaatcataaacccgttcttgctttaccttacctagcacttctgccaattgatgtcctggttcaaaacgttttttctttaatatacccaactcgactccattattaattacatgaagcttacttttttcaggcaaactgattgcaggaatatagacatgttcattacggacttttgctttattacgccagtcacttaaagcaactggtaaattaaactgatccattacctgaccaactagttcctgatcatttttggttaagcgccacggatcacgcttggcttttttgtttttgctctttttttcaattctagctttacctactttttgtaaaactgccacaaattgtccttcacctataccatcttgaggccaaaagcgtaatgttttagtcaaatcaggattcccatcagcccactcaggctgtccaacatcaatcttattagtttgtatccctgtatctaaaattgtaaaaccatattctttatttaaccagctaacaatctgctcatcctcttctggtgcaaaggtacaagttgaataaattaagcgtccgccaggttgaagcatcttaacagcttcattgaggatctctttttgacggttctggcatgttaaaacatagtcttgagaccaataatcaattgcctccggattttttctaaacattccttcaccactacatggagcatcgactaaaatcacatcaaaaaattccgaaaaaattggaactaacttttctggactttcattagtaattaaggcattactgatgccccaacgttcaatattttcccgtagtgcctttactcgtgttgcagagatttcattagctactaaaaggccctcacccttcaattgttctcctaatgctgttatttttcctccaggcgcagcacacagatctagcacgcgctctcctggccgaacaccactaattgccgcaggaaacatagccgctggatcttgagaataaacactaccgcttacccactcaggatcttcccccgatacttcaccataataggctgaatttatttgcggtactgaatcagtaagctcatatgaaaccttagtaggcttcaatgtattaattctaaaagcttttttgctctcttcattcatcgccgcaaatagttcttgtgcttttttggtacctaataatttttcatatttagttttaaattcatttggtagatttagcaattttcctgtcctttctcactaagtaatagaccatcccacaaaacgccaatacaattacaacccaggaagctattaatgtaactattaaagaaccatatgttgaataaaaggcatgccatcttaaaaagaagtatgtagcaagggcaaaaatagcctctattaaaaataaacgtacgctgcggttaattacccaattgcgcagcaaatcatcgtgtagacgtgttaaacgagcctgacgcttaattcctattgcaagcaacatatttgtgatcattccgaccaataggcaaacaactaacattaaaatatccggcacgacagataaacgatctcgatgatgctcttgaacaaaagacggaatatgcaaactagcatgataatgcttagcaatcttttcaatcactgcaggtgttgcatctactacaattcgataattcttgagctggtctttagcagttggctgatcaattcctgtacttagataatatttatccatttctacctgtggatagtccttaaattcgcctataacagaataataatttttgcctaaaataacatatttattattctgcacatctaataaattaagtttaactgttggccccagcaccacaaaagaaacctgtcctttaaaatcatcaggcgaaaaatagcgaccactctcagttggcaagccagtaacggcatgattagcccaaacaagcacttgttttttttcataattattatctagatgcagttgaatttgatgattcgcataatttttgtccaaatattttaggaaagtactaatcttatcatcactatctgttctaaaatagcgggtattattagttaagccgtgtgcttccagcaattcgtcagcataattagattcaatattggagagcattgttccaattcctaaaaaagataataaaagaatcagtaacaaaaatatctttttaaaattcattttttatttcaaatacctgttcattaataaaatcgaagctttgcaaggaatgattaatctcgtctaaagctgcactatttttaaaccaattttggtgccaaaattctggtgaattagtagcaccatctttttcaccaacaaagagcaaatgacaacttggattatacttatgccaagctgccacagtttctaaatctccgtgaccgaaatttggtgaccacgaacatagaactagattaactgtgtgatacttcttaattgcttggtcagctggtaaatcttctactggataaaaaggcttagctccagtggtcgacgtcttggcccactctaatgagtctgtactgtgaactttaattccaacctgagtcaaagcttgagaccaatacgcgttgcctgccatgatttctaacgctgtttgtacatgcagcttatttttaattaactgcgcagtctgaatattaggcagagaccagatgccatatattaaagagagatattgccgaaaattattaagtaaattatttaaatcccttaaggccccttctttatctggtcccacctcaactaaaacttcttcaaattcatctggcaataaacctaatctgcgtggtgcccgcttcaatggcttacctgcttgtacataactatcaattaatgctatttcttcaacttgtcgtttaaccgcagtatgatttatctcttgctctaattttgttaatttcgtcaaaaattttgtcatacttaaacaccttaatatgattttaccattcaacggcggagaattcagttataataagactagcaagcaaaggagatattctatggttgaaaccaaaaagagaaatgatgatgaaagcattggccgctttgttttagacataattattatgtttgcaattttgatgggaatttactactttatttttagttttttcctatcaaatgaaacagtatctggtccatcaatgcagcccacatttgagaatggcgatcgtttgattgctgtacgtcattttacgcctaaacgaaatgatatcgtcattctaaaagcaccagaccaaaaaggtgctctgtatatcaagcgaattattggtacacctggtgatatggttacttctaaaaatgataagctttacattaacggcaaacaaattgcagaaccatatttaaataatggctaccaaagaaagtcacataaattaggtgaactctatactaacaatttcactttaaaaaagcgagtacctaaggatagttacttcgtcatgggagatcaccgcgatgtttccaaagattcacgttacttcggttttgttaagcgcagcgcattagttggccgagtcgtcttcaggtattggccatttacgcaatggaaaacattttaatcaatgaaattgcaaaaaattttattttttattccaatttgattaaaattagagggtaaggagaaattattatgaatgagcaagaagaattatctgatgcaattatcaattttcaagtaaaacaccatgttaatgacactgacctagcctttgctagtcacctctcagttgaaaaagttcacgccatgaaagttggcgatggacaattcacagccgaagaagtaaatcagctttatgattacatgtcagcaaatgcttagttaactacaaaaaagagcttcatttcttgattgaaatgaagctctttttttgcattaattaatctatttttggttcaagatatttcttcacgaatactagattcaaaataccgaaaacaaggctaacaataaacaagcataaatcatctaaccagattggatcggttgcttgtaaatttggactcttatcaacaaagccctgtaacttagacataaagatcatgccgcagtaagctgcgacaattaccaaaattgcgataattaacaagcgagcccaaactgtactcttaaacggcaagaaatcagtaattactcgcgaactaaaattggcaaagctgacaaagaagtaaatgattaaaattatcaaaatgataaacaaccaatgaaaagcaagcattcgattgctagttatttcaacgccgggaactgttttaattggatacagaccaaactcacgaaatgcttgagcaaaactgtctgccccgcaactagggatcagcaacagactattaacgatttcttgcagcaagaagaaataaccacatgccagcaaactgctaaatatattagctaagtatgtttttcgttcatcgctagctgctaaatgccaggtttgactcagattaattttttcattttgccaacatgtaatcgcacaaaaggcaaaatcaatgtataaagtcacatagacaaaattattgcgccagaattgccctaaatttttagacggcagatttgctagaccattccaatttttgaaaagaagaaaataacctgataaaaatactacagcaaagatattaattaagaaaaccaaataaataaattttcttttttgcgtccacatttgcctaaacaaggtccaaaaattcgtcactatctacccctccccttcaattaacgattaattatcttaggttcgacaaatttactcattaagtagctgtcgattgctcctaaaacaattgctcctgcaaagtactcaaccactgaaatacccaatggatcatatgctgcttctttggcaaaacgatgcaaatacatagcagtaatttgttcgtttagctgttcagcaatcaagattgcaataatcacaatcactgccatcacaaataacttaatgacaatattattgttaactggcaattgatcaacaattactttcgtcaaaaaattagcaaaactgacaaaagtcataataactaaaaccgttccagttaagaacaatagaaattcaattaataaactagcatctgcccaagtaactttagcatcaactaagtcatgaagcagtgaataatgatgacttaaattatcaatcatagcagcaacgaagcctaaaatgacttgaattacaaaaatataaatacattcaactaaactagaaagcatattaatcagccagattttgacacttgaagctggagctagctgccaagtttgactgaggttgattttttcattttgccagcaaagcagaccaacaaaaatcacatcggcaatcggcgtttcgagcattcctgcactaagcaaacgatctagccaattactgtccttactaatgttgagataagctaaattgcttttatctaacagagccattaccagcaaaaaaaggactgcaaaaacttgtaataacaaaactaagttagcgtagcgccttttttgcacaaacatttgcttaaacaaggtcttaaaatttgccataaaaaactcctaattctgttttgcttctacgaatttattcaaaagcaagatatcgatcaaagtaatcacaacatcaaagaccaagaattgaagaatcgtagtggcatagttaatatcctggctgttgaccataaaaggactaaactttcctaagactgaaaagataattgttgccgcatggcctaaaatccaaataatcgcaataattacaattactctaataataaaggtccatactttacttgagccacctggcaaaaaatcaataatgctgcggcttgctaggttaagcaaacttacaattgcgtaccaagcatagccaataaaaatgattagcagcaaacttccgagcattgtttgccagtctcttgctgaaagatggatgctagcctgacctattgctttgcgcacatcttgatcagacaacatcggcaaaagggtaacgattatcgtgaccgcttctaaaattcctaaccaaatataagttaaaaatgctgtcccaaaattgctaagcaaaaacttagtatcagttaccggaatcaagcgccaagtttgactgcgattaattttttcattcttgattgaagaaataatccaataaacaaaatcagcgataaatgacgttatcagcatcattactgcaaatacagcgagaaaagcaacaatcacattgacagaactagtatcttttccattaacaaattctggtgtaccattttccgaaacaaaaccaataattgtaaaacataaactagcaaaggcttgaattaagaagattaaatagactgacttgcttttttcttgaaacattcgattaaacaatgtgttaaaactagtcattattcatcatcctcatctgcataaaaactttcatagtattcttcgattgacttatgcgtttgacgaatgtcatctgctgacttgtgttccaaaacggtatgatcttttacaataaccacttcatcaagcaatgatgaaatttcattgacaaagtgatctgagattaaaatcgttgccttttcatctttccacaaaatgatggaattaataattttctttcgagccattgcatcaatcccaccaaaaggttcatcaagtaaatacaaatctgctttacgagcaaatgttaaagcaataatcaatttttcacgcattcctcgtgataactgactcaacttcatttcaggatctaatttcataaacttacgcagctcatcgaattcattctcatcaaaatcttgaaaaatcgttgcgtaaaatttaaccacttccttgatctttgttgaatcgctgaagccagttaaaccatcagtaaaagacaacttagcctttctttctgcctcttttgttgccccctctaaattaatttcgcctttgtaattcttagctacaccggcaataattcgcatcaaagtggtcttaccagcaccattttcaccaagtaacgcaacaatcttgccaggagctaaattcaagttcacatcttgcaatacttgcttctgatttttcttataacttacatctttaatagctaataaatcattcattctgatccccaccattttttaaataattctctaacgttgaaactaactcgttctttcctattccaaactcttccatattttgaacaaactgttctaattcattattaattaatgactgcttggtttcggataatagtttagtatcttcagtaacaaaattaccttcgccacgtttagtataaagaataccttgactgttcatctgttgtagtgctctttgcacggtattaacattaacggttaattctagagcaagttttctaacagaaggaatcttctcaccagctgttaacttgcctaaagcaatttgacgatacaagtattgttcaatctgaagataaataggaatattatctttaaattccatttactcagctcctattttgcactgtattattaatctattacactaactataatacttactttagtcactttttgcaagggctaagtttaatcactttgtttcacaagttcataaaagttaaaagtacaacaaaaagatagtctataatcctataatgacggtaattataaactatcttttatttttaatagtattagtgcataatttttatttattaactatgtttaccctatttcctaatctatcaataatctcatattagatcagaaatagaattattgatatttttagtcaaaaatgtttcacttacttagctctttcagcatttaattcagccattttgatcatcacgtcaacagctttccacatagactcaagaactgtgtattcataacgaccatgcatgttttcttctccggcaaaaatattaggacatggtaagcccatataagtcaattgtgagccatctgtaccaccacgaaccgggtcttcattgacttcaagaccttctgctttataagcatcgcgcgctaagtcaacgatgtccatatgtttctttaattcatcggccatgttgtaatattggtcccacattttaagtgtaattcgttcagtaccgaattcatcattcattttcttaacgattgacttaaccaaattcttccgctcttcaagcccatcacgttcaaaatcacgaataatgtaatctaagtgagcattatcaacagtaccagcaaaattcattagatggaagaaaccttcgcgtccatcggtatgttctgggcgatcgtgttctggcagttgattatgaaagtcaattccaacttgaattgcattaatcatttgccccttagcaacagctgggtgaacattaactccctgaatatcaagactaaattgtgccgcagagaatgtaccccaatctaacttaccaggagcttcaccatcaacagtaaaagcaaagtcagcaccaaagtcttcaacatcaaagtgttcagcaccagtaccaatttcttcatcgggagtaaaggccaatcgaatcttaccatgcttaatttctggatgattcattaaatattccgcaaaagtcattaattctgacacaccacacttgtcatccccaccaagtaaggtatcacctgaggccgtaataattgtttgtcctttataattcttcaaatgtggaaaaactttaggatcaagataaaactctgaatctcctaattgaattttgctttcgccatcataattttcatgaatctgtggtttaacattttctgaattaaagtctgccgtatcactatgagctaaaaagcccattactggaacatcataatcaacatttgacggaatttcagcgattacactaccagcattttgattgtagtgaatgtcacttaaacctaattcttccaaatctttcataataacattcttttggaagttttcttctctttcagttgatggaaagcgatctgaatgttcgtcagaacgcgaattaactttaacgtactttaaaaatctaggtaacaaattaggatattccatatataactctctttctaattaaaataagtcttgaaatggattagtagaaacctcggaaagctcaattccaacattccagttattttcttcattccactttttaagtcgaccatagaccttgtacttaaatagtttttcagtataatgaccaggatcaacaacagttaaaccagatgaaatcatatcatggcctacatgataataaacatccccagtaataaaagcatctaaatggtcatctaaggctctagtccaatatttaccaccatccccacaaataaatcctacactggtaattggcttttcattgtttgcagtaatcagacgtgccattttaatttgcattttttctttaacataataggcaaaatcataagcagtcattgttctaggtaactttccttttctacccatagcaattccatcatcatccagacaaaatggttcaacatcttgcagacctagttcctctgcttgccaatcagcagatccatcttgggctttatctgaattagtatgaattgaataaacagtaattccattcttgataatattgccatacattgcgttttgtgcattcgcaaaatccaaattttgtgctggtctaaacattacaggatggtgactaacgatgaaatcaacccctttttcaacagcttcttcaactacctggggacgtacatctaaagtagtcattactttggtaacatcagcctccattgatccaatttgcataccaacaggatcaccttgtgaagcaatgttttccggaaaatcttgtcgcaaacgcgcaacaatgtcttttactttggtcatttctccaattcctccttgattaatttaatatcatgatctacttcattgattcgatcttcgtctttttttcttgctttattcaaattaaccaggaatctttgataataagcgagttggccttcccatttctgataaaaaactggattcttttcttgtacaataaaggggccaaaaaagatttccttttcagtcatctcatgcttttcttcagttaagctagccttaattaattcataagtatgcccagcctctgcaattaatttttctgagataatcttataattatgcatcatcagccaattacgtacccctgcttcgcctatattaggttctagtaccagagttttaaattgtgcatctttgctccaagctctatcaagaatatcagtcattaacttgccgcccattccggcaatcacaactgtatcaatctgatcagcatgagtaacggtttctaacccactacctaagcgagtttcaatttgctcggttaacccagctgctgcaatatcatttttagcattttcaagagggccctctgcaacgtcactagcaattgcataatcaattttgccattttttactaattcaattggcaagtatgcatgatcagttccaatatcagccactcgactgccaggatctaccatctttgccaacgtatttaatcttaaattcatgtttcctccataaaagatatggttaaccaaattttagcatatttcatagtcttattttgctactatttgatataatcgtcacagaaagcgggttttttacatgagtagaacagaaaatgtcacattaactaatatgtgcatggttaaaaacaaagatcaggttttagttcttgatcgcaacgatccggtctggccaggacttacttttcctggtggtcatgttgaagcgcatgaatcttttcatgattctgtcgtcagggaagtcaaagaagaaactggattaacgattagtcatcctcaattagttggtgttaaacaattttatgatcacaatgatgaacgttatttagtatttttctacatagctgaacaattttcgggtaccgttaaagaatcagacgaaggtaaactaacctggatgagtgctaaagaattgaaaaagcaaaagttagcttacaattttgatcatgatttaccagtattttttgaacaaacaattagtgaacatacgcttgacggaaagcgagatgagctattttaatgaaaaaaactgaaagtaagtttgcacttttagctgctttaattgctattttagcttttgcctctattcccttatggcaaaacaatctgaatagtttacgaccacaaactcacacggttaagaaaaagaagactgctaaaaagaaaaaagtcgttcatcttacttggggttacccttttaagaagctctatgaaaagaaaatcaaatttaaatctggacaaaagtttggtgaaactgacgtcattcgtcgagtctatcctagcaagagttattttcatgatggctatgacttcggatttagtgaagttggacattcttccgtatatgctgtgcatgcaggaactgtccatcgtgttaaatacgccccaggtttaggactttatatttggattatttccgatgatggctatgttgaagtttaccaggaaggcttcctcagtattactgatatttatgttaaaaaaggtcaaaaagtcaagttgggacaaaaaattggtaaactgaccggctctcacattcatttaggagttactaagacagataaagattacattgataaaaagcatgacaatacgccatgcaaatactattggaaagataatggcacttggttaaatccaatgaaaatcattgaagataatctaagggcagcaggtaaagatccagtccaataaaaaagagctaagtaaaacttagctcttttaatatagataattataattaatccatgaaatcacgtaattgatttgagcgacttggatgacgcaacttacgtaatgccttagcttcaatctgacgaatacgttctctggtaacaccaaataccttgcctacttcttccaaagtacgggtacgaccatcatcaagaccaaaacgcaaacgcaaaacattttcctcacgatcagttaaagtctcaagtacttgttcaagttgttccttcaacatttcgtaagaagcgtgttgttctggactagttgcatccttatcctcaataaagtcgcctaagtgtgaatcatcctcttcgccaataggtgtttctaatgaaacaggttcttgagcaatttttagaatatcacgtactttattggttggcatattcatttctgcaccaatttcttctggtgtaggttcacggcctaagtcctgtaacaattgacgttgtatcctgatcaatttattaattgtttcgaccatgtgaacaggaattctaattgtacgtgcttggtcagcgatcgcacgagtaattgcctgtctaatccaccaagttgcgtaggttgagaacttaaagcctagacgataatcaaacttatcaacagctttcattagtcccatattaccttcttgaatcaaatcaaggaatgacataccacgtcctacataacgcttagcaatagaaactaccaaacgaaggttggcttcggctaattcttgctttgcctcttcatccccggattcaattcttttggcaagagcaatttcttgatcagcagtaagaagtggtacacgaccaatttccttcaaatacatccgcactggatcgttcatgcgtacgcttgatggagcagacatatcctttaattcagccttttcaacatccttttgtttctttaaggctaactttgaaggatcaccgttttcatcaacaatgctaataccattatcttcaaactcttgtactagttgatctacagccttgccttgtaagttataaggcttaatcaaacgagcagtgaaatcttcttcagtgatcgacttatctttctttacgtcttttacgacttgcttaaccatcttatccaaagatagtttttgtgtagtttctttttctgccactaaaaagcctccttattaacctaagatccgttttaatccaataatctcctgagtgattgcaataattccttgtgcatcatttttgcgcttagcatcctgtaattgagcttgaagctcattcagcctggaatagatgttgcgtctttttaatgctagaaccaaagcatcaacttcttgaattgtagaatcttttggcatctgtgccatttcagcatctactattataccttgaagttgctcaggaataaaatctaagaacccatcaatttgtggattttcatgagtttccgcatattttaaccaatcctgtgccagagtttcaaaatcctgattaggaaaatgaaattgcccttctaacatatatttttgagcatcagttgaatgaataaataaatacaagagtctggtctgactaggatttttttcaactactgactgctctgtaggcacgtcttcatcaccaggtaaaggtacgtctatcggataatcaggtgaatttctttgagaattacgtacatgattgcgtgcccgattatttcgccgtctttctttagcaagatttgcctttaacgaagcaatagaaaccccactagacttcgccaatttttcagtatacatatcttgctcaactggattgcgcacttgtgcaatttcttttacggcctcacctaaataagcaatcttttcacggtcattatctaagttatatttttgttccaaccgttttaagaaaaagtcagtcggcgttaaggcacctttgacttcttccagatacttctcagcgccatattttttgacgtattcatcaggatctagtttttctggtaaaactacaattcctaaattaaaattgccatctttattaaacatacgtgcagcacgttcttcggcatggactcctggatcatctccatcataattaataatgatattaggagtaatacgtctcaacaaatatatttggtcatcagttaaactagttcccattgaggcaattcccgatttcacccctgctttatatgctgcaattacatccatataaccttcatatagaactaagtgaccttcaccacgagctgctttctttgcttctgcaaagtggaataatacctttgacttggtaaaaatccccgtttcaggactattcatatacttagcttcggtcttatcatcagaaattcgtctaccagaaaagcctatcgttctcccattttcattatccaatggaaacatcaaacggtcacgaaaacggtcgtataactgcccatccctagcttgaacaaataaaccactttgtgctagatcatcatcttgataacctttactacgtaaataagtaatcaaaacattatcagccttaggtgcatagcctatcttaaaatggtctaatatttcttgatctagttctcgcttttgagcatactgcatcccccgttcaccggctttagtagtcaaaagcacacgatgataaaaatcaacggcatcctgatgcatttgcataagtggatttaatttggtgccactattatgaccatatccattaggcatagcaatatgggcaaactcagctactcgctcgacgctttcgggaaaagttaaatcatccttatacatcaagaatttaaaaacatttccacccttaccacaaccaaagcacttaaaaaactgcttatcagcatttacagtaaacgacggagttttttcttgatgaaaagggcaaagaccaatatagtctttgccttttttctcaagcgaaacgtactgactgataacatcaacaatattgacgttactgcgaacctctgaaataaaatcttcaggaatccgtccagccatatgaatcaccctttttctatctaaattaactacttaataactaacttgcttaagtcacctaaacgatctgctaattcattaactgcatataattgtgctaatcggttattcttgaccttttcgtccttagccatgatcatattagtttcaaagtattgatcaatcactggttgcagttgaacaaaaccttggtagagatcagccaaactttcaatatcttgcaagttttgaacgccagcgtaaagttctttttcactgttatcatcaaagagactttcatcaacagcagtattactcttaaatttagccttctttaagatgttatcaattctagtcaaactctcaactactggcttgaattcttcatcatcatggtgaagttgcaatacagtagctgctgctaaaatttgacttggatcttgttgacttgaagcaagaacagcatcaataatatcatacttgaagtcattcttttgtaagtattgcttgacacgatcacgaatgaagtctgcaatttcctggtcagcatcactcttaggtagcttagctggagttacaccattaagcatactaatgatttctggtaaaacttcgttaaatggtaatgaccacttctcattaagtaagattcttacaataccatatgcataacgacgaagtgcgtatgggtcattagatgatgtaggaatcattcctgcaccaaagaaggttacaattgtatcaattttatcagcaattgataataatgaaccaaccgtagtttcaggaagtggaccttcagcagtggcaggcatgtagtgttccttgattgcaactgaaacttcttcgtcctcacctgcaagacgagcataatgcatgcccattacaccttgaagttctgcaaactcaccaaccatttgggtaactaagtcaaacttgtaaagttcactagcacggtcgaaatccttgactacattctctggtaaatcccaacgcttagctaagtaatcaccaatcatgcgaacacgttgcatcttttcagccattgaaccaatcttatcgtggaatgaaacattcttaagacgatcaacaaaatgactaagtggatacttgcggtcttcatcatagaagaattgagcatcgtccaaacgagcaactaaaactttttcattacctgaaataacattatcaaggtaatctttatttccgttacgaacagcaataaagtgattaattaacttaccagtttcatcatagacttcaaagtatctttgattgtctttcattgaagtaatcagcacttcatcaggaatcttcaaatacttttcatcaaatgaaccagcaaatacagtcggatattctactaaataagtaacttcttctagtaaatcacgatctggtttaacttgccagttgttcttcttaactaattcattcatttgacgaacgatcatatctttacgttcatctgcatcagcaattacaaattgatcttttaatgcatcttcatagtcatcagcattggccaaaacaactgaatcgcctaagaaacgatggccttgagttttacgacctgcagtaatatccaaaatcttaacgggaattacatcactgccaaataatgaaacaagccagtgaattggacgaacaaactcaaaatcatttgaatcccaacgcatcttagtagggaaagtcatcgccttaatgatatcgctcataccaagtaagatatcactagctttcttaccttccttttgaacgtgaacataagcgtattcagtacccttaagttcttcaaaatagatatcgtctgtagtcattccttggccacgagcaaatccttgagcagccttagtccaattaccatcttgatcttgagcaatcttcttagctggaccttttttaacttcatcaatatcgtcttgcttttcagccaaatcttcaaccaaaatagtcaaacgacgtggagttgaaaaagtcttaatatctttaaatttcaagccattttcttttaaaaattttcttgttctgtcagctaattgcttaacgctgcgtggtacaacgtgagctggcatttcttcagtaccaatttcaaataaataatctttagccattttctacccccgcctttttgtcttctgcacttttaagcaatgggaagccacgtttttcacgttcttcgacaaatttgacagcaacttcatgcgcaagatttctaattcttgataaataaccagcacgttcagtaactgaaacagcaccacgagcatcaagcaagttaaaagtatgtgaacacttcaaaatgtaatcatatgctgggtgaaccaagttcttatccaataaacgcttagcagttgcttcataaatatcaaagaattgaagcaattgttcttgatttgattcttcaaatgcatatttagaatgttcatattctggttgcttgaagatatcacgataaagaatgccattaccccattcaagatcaaatactgagttaacatcctgaatatatgacgcaaggcgttcaacaccgtaagtgatttcactcatagttggcttaacatctaattcaccaacaacttggaagtatgtgaattggctaacttccataccgtcaagccatacttcccaaccaacaccagcacaacccatagatgggttagcccagttatcttcaacgaaacgaatatcgtgttccaaaggatcgatacctaaaactttcaaactgtctaggtaatattgttgaatatccttaggagctggcttaataacaacttggaattggtggtgttggaataaccgattagggttttcaccataacgaccatctgcaggtcttctagaaggctctacataacaagctgcccatggttctggaccaactgcacgaagaaaagtgtaaggactcattgtacccgcacccttttcaacatcgtatgaaggcataatcatacaacctttggaggaccagaattgttccagcttaaagatcatattctgaatatttaatttcttatctgccatttcctttaatctcctcctgcgctaggccataaaaaaagcctatgcaaaattttgcatagggacgaaatattatcgcggttccaccctaattcaggaagtatccttcctgctcttaattgaacaatatgactagaggtgccttttcctagatgtcctcacaccgaccgacattcgctgaactagtacttttcttaaatcctcatcatcgtcaaatacgtttttattttaacacatgggtcatggtaaaaccagatttttactaactaaaaagttttaattcatctaaaaatttcttagtctttaaatttaggcctatcgtttcatggtaaatacgatcaatcgcttttctagtagccctcttcgtttcttcattaattttaatatcgcctaatcgctcaatcggtaataagccaattgttctaattacagcagtttcttttggctttaaatgcattcggctagtaactgtactaaaatgatcgctacaaataactccacccattttaatcgaataatcaaaaacgcctttttccttaccacaaataacacaatgctttagctgtggctcaacaccatatgctgctaatattttcatctgcacaatttgtgtaatcatttctgcatcaacgccactatctatttttttcaaagcaaataaagctaaatcataatatttaccaattggctgatattctacaaaggcgtgatcaattaaatcaaaaataaaagaaatataagcgttcttggttaaatcattatataagccatcaaactgccttgcccctttatatgtgcgtaaattacttaagcccttttcgctcgtataaattacgtaagtaccaatagaaaaatttaatgttgctgcacttaatcttgatttaggcctcagggctcctttaacaatcagagtcataatcccatcttgtttagtcataattttggctaataaatctgcttctttatatttctgccttttaaagataataccctgaacttcttttagttcacgtgccatatcatgactcctttagtatttaaaattcattttttatagatattctgatgaagatatcataatatcataaatagtctatagtacaaaaagactgctgtttcagcctccacatacgtggagaataccaagactttacccagaatcaacttcgaaactgggtttcagcctccacatacgtggagaatacagtaaacaaatcccaatataacaacaatcacaaaacaatagatcccaaaatttcatcactttgtcattactattgtatctatttttatcccattagttatccaacgaatagaattttcttgtctccctaaacatacaaaaaagacgtcatctttcgacaacgcttatacaacagtaattcaactaaagttcttttttgtcatagcctattcgctttaaaaagttagggtcagaacgccagttatgttggaccttaacccagagacgcaagttgaccttttcaccaagcaatctttcaatctcttgacgtgaattaatcccaatctgcttgagcatcttaccgcccttaccaataataatgcctttttgaccgtctttctcaacatagatagtcgcttcaatcaagagcttgccattttgatgagtattcatatgatcaactgcgacagcagtagcatgtggtacttcttgtgaagtcagtcgcagaatttgttcacgaattaactcggctaccacaaaatattcaggccgatctgtgatctgatcagcaccataatattgtgggcctactggcaaatattccttaatcgttttaagcagatcttcaatcccaattccttgagtagcagaaatcggtagtatttctttaaagccctcaagtttgtgatatgaatccataattggcaaaagcttattaggatgaatttcatcaactttattaattactaaaagaacaggaacttttacttcttttaacaagttggcaatgtattgatcgcccttacccatttcctcaggttcaaccatgaataaaactaaatcaacgtcattcaaactagatacactagccttatccatatagtcgtcaagttttgaatgaggcttaaaaatacctggcgtatctacaaaaacaacttgcatttcatctgaagtataaatacccgaaatgcgattacgagtcgtttgtggtttattagacgtaatggcaactttttgaccaactaaatagttcattaaagttgattttccaacattgggacgaccaactaaagcaacaaagccagacttaaactctttttcttccattatttacctctgccttcatctaattgatcaggatacaatggcaaaccataatcttctaacacttttccttgaataccaaacatttctttggcctcatccggcttaatgtggtcgtagccgtttaaatgtaaaaagccatggactattgtatatccaaattctcgatcaaaacctgtaccatactctttactgtgacgcttaatcacactaggacacataaatagatcaccgatatcctcttgaaagtctggatcatctgcaaatgctgcaagatcaattgaatcctcaccatcttcaattgcaaaggaaattacatcagtaggacggtctttgtcacgatactttaaattaatttcatgactacgatcttcgtcaacaaagttaatactcatctctaagttgttatctttgccaatttccttcttagctagcagcaaaagtttcataatccagtcttgccagttacgcttttcatcatctaaaaagccaacttcatcattataagtaatatcaattggatccatttttagtgtttaatgtcctctttttcataagcagtaataattttcgcaactacagggtgacgaacaacatcattagcagaaaagttgataaatttaatttggtcgatattcttcaagatatgtctagcatcaattaacccgctatgctgtcgaccaggtaaatcgacctgtgtcatatcaccgtttacgaccatcttagaattaaatccaagtctagttaaaaacatcttcatctgggcatctgtagtgttctgggcttcatcaagaattacaaaagcgtcatctaaagttcgtccacgcatataagcaagtggagcaacttcaattacgcctcgttccatcaaacggtcagtcgtattagtcccaagaatagcatacaaggagtcataaattggtctcaaatatggatcaactttttctttcaagtcaccaggtaaaaatccaagtgattcaccagcttcaacagctggcctagtcaaaatgattcgagaaacttctcccttcttaaaggcggcaattgcacaaactacggctaagaatgttttccccgttccagctggtcctattccaaagacaacatcagatttatcaatagcttcgacataacgcttttgtcccatattcttgactctgataggtctacctttagcatccctaatcaaaacctttttatataggtctgcaaagtactctgtggtacccttgtcagccatcttcatcgcacttactgtgtcgggcgcaccgatgttaacaccagtattcacaacactatcgagtgcctttagaacagcaactaccttcttgatcttctcttcatcgtctcctgcaatgacaatctcattaccgacatctgacacagaaagatcataaccttcagaaagaagctttaaatttccgtcattaactccaactagtttttgaatattttctggtctttgaggtgtaaaagttgtttgagccaaatagacccgctccttcttgttactactaatttagctgatcacgaactgattgcgaagcagccttgccatcggcacgtcccttaatctttggcattaaagctttcattaccttaccaaagtcggacttacctttagcaccaacttcatcaattgtttccttaacagctgctctaagttcatcctgattcatttgcttaggcatgtacttttctacaactgctaattcttttttggtttcttcagctaaatcatcacgattagccttaataaattcgtcaatcgattcttctctttgcttcttttcacgattaagaacagttaattcttcatctggagttaaatcgtgtcctgctttaattttttcattcattaaggccgatttgatcatccggacagtattaagagttgtcttgtcgtgattcttcatagctgatttcatatcagccatgatttgatctgacaaactcatttaatatccttctttctattaaaaacccaatagtattataacaaactatgttcttaactaaaataaaactaacaaatatttacttaacataatcaaaattatgcttcaagaagtcaaaaagaaaagctacccaaaaacaggtagctttctcagtagtttattaataatgtctacgcttacgtgcagcttcagacttcaactttctacgaacactaggtttttcgtagaattcgcgcttgcggtattcttgtaaggtaccacttcttgaaacggaacgcttgaaacgacgaagagcatcatcaatagactcgttttcgtgaacgattgtcttagccatgtgtgatccctccttccatttcttggcgttgcgccatacatttacttaaattataccaaactaatctttagggtcaatacaattcaaaaactttttgataaatttttaagttaagtaaaccgactactttaccttaataaaagagctgagtttttattgttaatccgctttcattaatagtataattattttcagaaagatatttaataatacacgaggagcttaatatggtagaaacaaaagaccaaaatgaattaaacattattattatttctgatgcggctggtgacactgcttttagtaacgccacagctgcagctgcagaatttcctaactgcaatatcaactatcgtcgttacccctttatcactaaccaaaagaagttggacgaagttttaacagaaattgaaaaatatccaaacttggtaattatctacagtttggttaaagatgaaatgcaaatgccagttatcaaatttgcccgtgagcataatgttgaatgtgttgacatcttctcacctgtagttgaagcaattcaacaaactactcatatgacaccagatcaaaaaattggtgcacagcatagcttaaatcaaaagtactttgacagaatttccgcaatggaattcgctgtaatgtatgatgatggtaaagatccaaaaggtttcttggaagctgacgttgttttacttggggtatcaagaacttctaagactccactttctttgttcttagccaataagaacttaaaggtagctaatttaccacttgttcctgaaactcacattccaaaagaaatctacgaaattgatcctaagaagattattggcttgactaacgatccatctgtattgaacgaaatcagacgtcaaagaatgatcgcttatggtttgaatcctgatactacttattctaatatggattcaatcaacaaggagcttgaatcagcacaagcactttataagaaattaggttgctatgtaattaatgttgctcaccgctccattgaagaaactgccgcacttattttggagcacttgggtattgatgattacgctaagtaataatagatactaagatcaagtatgtccaaaaatcgttctagagtttctctagagcgatttttatttacagaaaaatatttgtaaatttatgcatattactgttctgactcccatgatctaacaatcatctaaaacagaaaacaggtattccaggcgcgatagtgggatctaaacctcattgatctaacaatcatctaaaactacctcacacctctattatttatttctttagatctaaacctcattgatctaaaaccgtacgttggtaccgccgcaaaagctaatagatctaaacctcattgatctaacaaccatctaaaacgtcttacgcatgtaaacgccgttttcacgggatctaaacctcattgatctaacaatcatctaaaacccgcgttaatgttgatttttctaaattcgagatctaaacctcattgatctaacaatcatctaaaacgttcctagcagggacaagattcaagtgcttgatctaaacctcattgatctaacaatcatctaaaacacgtaagcaccttttgaattggagactactgatctaaacctcattgatctaacaatcatctaaaaccgatatttcataatatctttttaatcaattgtctaataccaatcaacaagatctcgatcaatatatgcaacttgagcatccttgactgctaccccatatttcttatctgtgaattcaattaaaataattttcaatttaagttgtctaacaatcttactaagttcttttaactgtgtttcatcaaggtaatgagctacattacaaaacacgggaatactatcaagattatattcttgatgaatcttaagaactgtttcaattatagcatatggtgttaacatgaaactgtcaaatcttttgtgtaaatagatctttctcgtaaattgattttttaattatttatttaatcaaagtaggattctaaggtgtcctgaacctgaccaaagcatttatgaattcgattgaaataacggtcattgtagctcattgcctgaatgccaataaaagcatcaagcgactgttcagttggaaactctgccttaggcttagctttgcgcttgatcacattgttaaatgattcaatcatgttagtcgaataaattgaagctctgatctgcttgggatagttataaaagaccagcagatctggttctatgtctttcaagcttctgataacatggctgtaaaccttgccccatttggtatagaagtcatgcaggacagctgtggcttcttctttgtttgtctgttgatgcacctgtttgaattcgttcatgatcttttcgcggtcatccacccggactttagcacagatattgcgcatgacatgaaccaagcagcgttgaaaatgagctttaggataagtcctggtcaaggccgctttcatgccaacaacaccatcagaaagaaagagctcaacttgcttcaagcctctggacttcatgttttgaagcatctctgtccagacttcaatgttctcactaggcgcaatgcagtagtcaatgacttctttatgtccattaggtttaatgccaatggcaatatagactgcttcacgctcaaacgtttctcggcgcaaaggaaggtatgtcgcatccaaatagacacagaaaaacttgtcgcttagcttgcgcttgtgataagcctcaaccttggggagcatctgcttggaaatatttgatacttgggctggactataatgactgccatacattttctcaatcaagtcagcgatttctctggtagttacgcctttggagtagagcttgataatcgtgctttccaaaacatcagagtgctgcttgtagtcaggcagcgtgtgctgatgaaactggccgttgcgatctcgaggcacttgcacttcaattggtccaaactgggtatcaaccttgcggaaataagcaccatttctagaattgccagtattccagccatttctggcatagggatcatagcccagaaaggcagtcaattcagcttctagcaagttattaacagcctgttgtagctctttgcgcaataaatcgtttattttgtctggattgaatagagcttgtgctatatttttggtaaaatcattcatgaaggagttcttctttctgtatgtgtttttttgttcaaaccaatcatacgagaaaggaactcctttttctaatgtttaaagaaataaatttaaggaattattcatccttacacaaactattttacagtctcgttaacattaattgagcatctaaatgaatgttaaccattttcaacagctttttaatatcttcgctaaaatcaatttctaaaggtaaatcttccaaaagcaaagaatcattcaatactgtttctaatgaataaaaagattttaaaattctatttctgtttacctcatccaagttagaaataaagttcttaataatgacattcatatactttgccataatattgtcatttaacaacggggctcctacaaaatcaaaactcttactaatagacttattgttgtattcgtcatcagaacatactattagatcatttaaggcttgaaaacctaaaaccagatctttataggcaatgggactttgagtgcaaataacattaattccatcttttaaacagattttcttatgtgacaaataggaaacaatcatagtatcactgtcctgtctgaagtattgcgaatatcttttactgcatccccaaccaagaaatgcatatcactgtactgtttttccgtaaccattagactttgcacaacacctttgctaggcataaattttcttattctcttttctaaaaaattagctgtttgtctagtgacacatactctttcatacaccgaaaactgaatcattaaaaatccttcatttattagagcttttctaaattgtcgatattcttttctttcagcggcagtgtccgtaggcaaatcaaacattatcattaatcgcatcattcggtacctcattacacaaactcatctctattctaatatcatctgtttctccacttaaatatctaaggcagcttcttacatatacagaaattgcattcgttaaaattgtattcctaccattgaattttatttgtaagctaagcaactcaactaatccatacttaatatctggtgtaaaactggtaatattttcgtgtgccttaacccaataatcaactatggatctaaatggttccattaaatcacaagctaaattaaattgattttccactgaatgatgatgtattcccagataagtcaaatatccattcattgcaatttctctatcgaaggatgaaagcaatattgagtatccataatctagtgctgcattaatcactccggaatttcttctaataaagtccttaccaaataacttcatgaaatattttctagcagccgctgcttctctattggataaatcgttcacctctaacttgtacagctcttgctcaacttcagtttcatcaattcgataattttttaacaccgatatttgattttttagcttagcagctacaattttggtccataaattttcttttcttctttcattccattcaaattgcattttcaacttctttatgtccctagccccaggataataattcactgtctctgtaacaggttgatatttatcatcaacaaagattaccttgcattgatttttggctaacttacttatcaaagcactagtaatcacagcctgtgatgttgaaattaaaaccaaattgatatcttcaataggtatttgattaataccatcttttgtttggactataagcatattcatagagtatgttagctttgcatgctgagttattattacgttacgccatcccattttttctccttgtacatctatatctataatgatattatttatttgttgggtagctcccaactcttaaccttattgatctaacaatcataatttaaaatcaagcaatgcgttttagtacgcagagtttcaacacttgtcccgagctatcgagggactttttttatgtaaaaatgaggaaccacatgtcggttcctcatttatttttataaactagaaatcttaacgcgtttttcaaacaaaccagtaggtgattgataaactaaaatagtgtccgaagataatgtaattccagaattattttgaagttgaccaaatggtacagttataccaatatctttaagttcacctgtatcagaattatcatgcaaacccttcaaaatttgaataatagctttaaacttatcctcagcgtttaatttcaagaatttttctctacccttatgtaatttatttctaaaatctctaatgtcaaacaaaggtaaatatctatcaatcttttctaaaatttcatcgtaaacatccaaaagttcttgatcttgcttatcagaatctagccaatgaccagtaattactctcattgcctcttctgataaaaccaactgttttgcattacataaataaatagcactctttaacaaaaattttttattgccatcttgcacaacctggttatatggaactttacctttaataatatcaaatgatattactcctgcttttcgttttcccttatcgttgtataaaatacttggtgataaaatttgctttagaatcttttcatagttaccttctttttcagctttatttaaaatagcacgcttcgtcataggtacagcaattactttgtactgtgaagatttagtcttattaattcttacaattgccatataggctgctgcagtaccagtatagccaccataaatatctgttgaaaatcctttacgtttttcaattaatttacgactcttcgctatatcccgttcagcccgaggatatatagtcattccaaacatctcttgattctttgttgtcgtatctctagatacaagcatatatttgtaattatatgccttattaagttgcaatcgaattttattcttttcaaataaaactttcccctgttgagatctgatctcatttggtgctttactacccaaaagtttggcaacaaagtcaaaatttttggtcttttttaaaatttcattttctttttttaggatcagaactaaactttttaaattgaccataaacaaagaatggccgtaatttaggatacgcttgatacagtagattcccacaaatagtagttaaatatgcatcaattgcatggtgataatcattaacctctcgacttttatacaaatcaaactcattacgtaaatagtgattagaactagccttgacaactattattttagtctttggatactcagcttgaagaattgtagttgctaattttatgatttgacttgtctcaactaattgtttacgaataaaacctgaagcttgatgtttattaatattctctggatctaggaataaattattttgttttgctttattaatcagtcctttatcagcccagttattccacatctgcttaaccgttatccctaaaccagtagctagattatcaccaaagagttttaaaggaactccatctgacttaccattgtttattggtttagcaaccaacacacgattattcagggaatcatctttaataaaactttgaggcaagatatggtctatgtcataatactgagatacttcatcaatattaattggcttaccagtataagcatctcttccaagttgcatgaagtgtctgggaaaaaactaagtctcagatcatgaaaaaagaacgttgaatttttgtttcaacgctctttttgtatacttttagctccagccttgatattattaaatcatcacaaaataaaaaaggtggaaactaacatgtacaagaattatatcacaggtcaaactgctttaacacttaatctagattttgccattccggccaatcatttggctaatgtcatcagctggtttgtagattcaattccagaagatgttttagtaggcaagactgctaaaacgggccgcccagcctatcatccagccatgatgctcaaaatactgctttttgcttactccagaagagttttttctggcagaaagattgagttgatgctggaagaaaatctgccaatgatgatcttggctgaccagcaaaagatttcatatcatactatcaataattttagatcaagcagccatgccaatgaactgattaaaaagagctttatctacttcactaacctgttagaagatgaaggcttaatcaatgaaggtgctgcttttatcgatggtactaagattgaagctgatgctaaccgctatacatttgtctggcgcaaagcggttgaaaagtatcatgaaaagctgaaaggccaggcagttgaactttatgatgaattgattactaaagaagtagtcaaagaaatggaaaaagaaaaagttcaaactagtcaggggctaaaggaattagctcaagaaactgaagcagaaattaacaagctgactaaagagattgagcaggaaaacaaagccattcctggcggttcacctcgaaaagccaagcgacgtggactaaaaaagattctgcaccggctaagaaaagattatgtgccaagaatgcaaaaatatgaagaagccgaagagatctttgccggacgcaacagttattccaaaacagatcatgacgccacctttatgcatatgaaggaagaccacatgaaaaatggtcaattaaagcctggctacaatattcaagcagtcacgaccgatcaatatgtagttgattatgccatctttcctaatccgacagatttcaaaactttggagccggttttggatcaaatgaccgtgttggacaagtttgacaaaatcgtcgccgatgctggctatggcagtgaatacaattattcgatgctggaggaaaaatatccagacaagaagtactttattccctacactatgtatgaaaaagaacagaccaaaaagtataagaatgatccaactaagctaatcaactggtactacaatgaaaaagatgattattacattgatcatcatggcgtcagattcaatttcaaatattacagccagcgcaaggatcgttctactggtcaggtccgtgattttaaggtttatgaggcagacgagttccagctaacgccagaattggaacaattggctaaaacagctagcggccgccagcgccaagttcgctataatcctaactggcaatatttaaaagaaaaagcaaaagaagttctccaaagcgaagaaggcagacacatctatggcatgagaaaatatgatgtagagccagttttcggacatttgaagaacgtatttggcatgcgcagaacgcacctgcgaggtaaagagaaggtcgaaaccgatatcggaattgcctttatgatgatgaatttgaacaaatattgtcaaagaaggtggctgaagggccgatttttattgttaaaaattttaaagagaacaaaaaaacgatcaagattcttaaaaaaggaaatcttgatcgtttttattcatctggaagctagttttttcccagacacttaattgattattcttgatatattcagccagcttatccttcaaatttttatttactatatctcctgatattttttggtaaatatcctgtagcttatgccctcgtgtttgtgataacttagaatttcttctactttcacgtgcaaattcaatagctatttgtttaggtgcttgaccagaagcagctttttgaatgtcatgaacaacttttacaacctgcctaatcattttcttatttgcaggagaagtatacgcttctgataaaatatcttccatactatttgaatgcatgagatcttgatttgcatctgtaattgtgccttttatatctgctttatttactatactcatgaaaatttgttggctattccacaactgctcaataatattttgaccatttgaatctacaatagcagttaacaattttttagataatctgccccaaccctgaagtctaatattttgtaggaattgaatttgttttgctgtaagccaatcaattgtttgaagcttttgtatataaatctgcttatcttcaaaaatagttgaccattcaataattttttcaaaatcatcacgaaattcatttgagtcaagtttatcaacaaataaacctgacttttttaatttaatgtatgtagataaactagaattaaatttagtttgatcagctaaccccttaattttgatataaggcaatttctgattttctattaaccaatttttagaaactgtcaaatcttttgtgtaaatagatctttctcgtaaattgattttttaattatttatttaatcaaagtaggattctaaggtgtcctgaacctgaccaaagcctttatgaattcgattgaaataacggtcattgtagctcattgcctgaatgccaataaaagcatcaagcgactgttcagttggaaactatgccttaggcttagctttgcgcttgatcacattgttaaatgattcaatcatgttagtcgaataaattgaagctctgatctgcttgggatagttataaaagaccagcagatctggttctatgtctttcaagcttctgataacatggctgtaaaccttgccccatttggtatagaagtcatgcaggacagctgtggcttcttctttgtttgtctgttgatgcacctgtttgaattcgttcatgatcttttcacgatcgtcgacgcgtactttagcgcagatattgcgcatgacatgaaccaaacagcgttgaaaatgagctttaggataagtcctggccaaggctgttttcatgccaacaacaccatcagaaagaaaaagctcaacttgctttaagcctcgggatttcatgttttgaagcatatctgtccagacttcaatgttctcgctaggcgcaatgcagtagtcaatgacctccttgtgcccattaggcttgatgccaatggcaatatagactgcttcacgctcaaatgtttctcggcgcaaaggaaggtatgtcgcatccaaatagacgcagaaaaacttgtcgcttagcttgcgtttgtggtaagcctcaacctttggaatcatctgcttggaaatatttgatacctgagctggactgtaatggctgccatacatcttttcaattagatcggctatttccctggtggtcacgcccttggagtaaagcttgataatcatgctttccaagatatccgagtgctgcttgtagccaggcagcgtgtgctgatgaaattgaccgttgcgatcccgaggcacttgcacttcaattgggccaaattgcgtatcaactttgcggaaataagcaccatttctagagttgccagtattccagccatttctggcatagggatcatagcccagaaaggcagtcaattcagcttctaacaagttattaacagcctgttgtagctctttgcgcaataaatcatttattttgtctggattgaatagagcttgagcaaaatctttggtaaaatcattcatgaaggagttcttctttctgtatgtgtttttttgttcaaaccaatcatacgagaaaggaactcctttttctaatgtttaaagaaataaatttaaggaatcattcatccttacacaaactattttacagtctcaatttttaagctgcttagctgagacagtattattctttttgaataagtcctcataaagttcttgctttacgctaacagataatttcttcccattcacactaattttatttaattcatccaaaacagtatatttttgatataaaagactatttgctggaagaacatcttcaccaaacaaataagtatcttttgttgtaagtcgtttaataaagttatttgcagacttttgtctatcaactttttcatcaaaattccaaggcgtaattcgacctttagcttttctaaccatccaagcaaaagattgattttgtcgagtttgaggataagatgaatttgttggttcaatcattggaccaacatagtatggcaccctaaaacgaatcagttcatcaagcttataaggtgcctgcatacgatgagctttaattggattaatctcttttaaaaatggataatattttccctgattttcaattatcttatctagctcgatttgattaagctggaagggaattacgccgttttcatcgcttcgttgcttaggcataaacttatctaacgctatttcttttctaatttgaactgcctcttttgatgcatccaaattctttttaactatttcataaaaatcgctttttcgataaaggtgcttgttgggaaaggcttttttagtttcaacatcaacaaaatgacggttattgacatatttgtcgtaagccaactgtaaattgtgagcttttttcctgtctgaatggttcttgattactgtttttagcaatttcaaatcttgggcatgatcgttatattttcttatcatagattccgataaagttgaaccttcatcgacaatattcagtagagaaattgcactaaataagtttctaactaaatccaatatctgtaactgagtatcagttaaatcagaagtaatttcactcaaatttacatccgcattttcatcatttaatttaaaattccaaattgagctgtcagtcttgtctacatttacttgtaaaataatttcaaattttgctttgtatcctaaaattgctttgctaatttcttttgaaatttttttacttagttttagaccagacttattttcagtgtcgggtaacacatcagcaatttcttttatcttatccagtttaaacatttgttcatttcgaataatgtcttcaacttttgaagcatttcctgcatcaaaaatcactccactttctggcagaaatatggaataaagatcgtttagttcatttacaaacctatcgatttcaatctttgacgcactaaaattacttatggatgaattagacaaaaaatttcctcgatatttcacgatatgatgaatggcaatataaatagcccgaagatcaaacttcttatcctgtttcattaaagcgtttcttaaatgataaatagttggaaattttttataaaattgtttatccatttttttagttggaaagacaattgaagacacatttttccttgtgtccaatggagaaagtcctgactcttttaaacgagcaaagaaatttggatctacctttgccatttcttcatcaaaaatttcttccaacaatttaagacgccattttcttcgctttatacgcctcctagtagttctaaaagctcgtctatcagcagctgatacgccttcatcaaacaagtgcgagccaagtgctctttttccatgcatttttaatatattattatcaaaatcagtagcaacccacccacatgaattagtaccaatatctagaccaaccatatattcattatttaacttcgtcattattattctctactttcattgtccaaatgagactgtaaaatagtttgtgtaaggatgaatgattccttaaatttatttctttaaacattagaaaaaggagttcctttctcgtatgattggtttgaacaaaaaacacatacagaaagaagaactccttcatgaatgattttaccaaagattttgctcaagctctattcaatccagacaaaataaatgatttattgcgcaaagagctacaacaggctgttaataacttgttagaagctgaattgactgcctttctgggctatgatccctatgccagaaatggctggaatactggcaactctagaaatggtgcttatttccgcaaagttgatacgcaatttggcccaattgaagtgcaagtgcctcgggatcgcaacggtcaatttcatcagcacacgctgcctgactacaagcagcactctgatgttttggaaagcacgattatcaagctatactccaaaggcgtaactaccagagaaatcgctgacttgattgagaaaatgtatggcagtcattatagtccagctcaagtatcaaatatttccaagcagatgctccccaagattgaggcttatcacaagcgcaagctaagcgacaagtttttctgcgtctatttggatgcgacataccttcctttgcgccgagaaacatttgagcgtgaagcagtctatattgccattggcatcaagcctaatgggcacaaggaggtcattgactactgcattgcacctagcgagaacattgaagtctggacagagatgcttcaaaacatgaaatcccgaggcttaaagcaagttgagctttttctttctgatggtgttgttggcatgaaaacagccttggccaggacttatcctaaagctcattttcaacgctgtttggttcatgtcatgcgcaatatctgcgctaaagtacgcgtcgacgatcgtgaaaagatcatgaacgaattcaaacaggtgcatcaacagacaaacaaagaagaagccacagctgtcctgcatgacttctataccaaatggggcaaggtttacagccatgttatcagaagcttgaaagacatagaaccagatctgctggtcttttataactatcccaagcagatcagagcttcaatttattcgactaacatgattgaatcatttaacaatgtgatcaagcgcaaagctaagcctaaggcagagtttccaactgaacagtcgcttgatgcttttattggcattcaggcaatgagctacaatgaccgttatttcaatcgaattcataaaggctttggtcaggttcaggacaccttagaatcctactttgattaaataaataattaaaaaatcaatttacgagaaagatctatttacacaaaagatttgacagtttcgtccaaattattatttttgagccaaattaatgtctactatcatttactaaattcaatgtaaacgttattaatttaattctatgtaaatcccaaaataaagtaaagaaatttcaaaaatacctagactcgtaattaaaaacatattcacatatactcatactaactttttgttattaatcgaaatttaattgtaactttctcgtaaaactgctgagctacaatagtttaggtgaattaagagaggagataaaaatcagaacttatctggtttctttttataatgaaatttcgtaaattaataatttctttgttaggtactgcattattaacttcaagcgttggtttatcaaccaccactgcttctgctgatacgcttgatgactcacaaaatacaactgaagttcaacccaagaacctcaagtgggcttatccgtttaaagccaacaagaaaaatggtgttcgtccaatgtataatgcacaaacttttggcataactaactatatgcgttctactacaccaccttcctactttcatgatggttgggattttggtttttcagaagttgggcattctaacgtatatgcaattcatcaaggtactgttaaaaaggttgcttatggcaacggccttggctggttcatctgggttattagtcctgataattacgttgaagtttaccaagaagggtttaataagaaaaaagacatttatgttaagactggtcaaaagattaaattagatcaaaagatcggtaagctaactggctcacacttacaccttggcgttactcaaacaaataaagattacataaacaaatatggttttccatgtaagaattggaacgttaacaacggaacttggctcaatccaatcgaggttatcaaaagcaacttaaagaaatagttaacataatctaaaatattgaaagtaaaaaagcaggtcacagcttataacagttatgatctgctttttattaatcccaatgttccttgataaacttagctcttccaccagcttcttccattgcatatctaagtggatcttttttataaaaatcttggtgatattcctcagctggataaaatggcttagctggttcaattttagttacgattggtttatcaaatttaccactagcttgtaatctttgcttagatttttcagctgcttctttttgagcaggtgaattataaaaaattacaggtcgataattatcaccacgatcttggaattgccccattgcatctgtgggatcagtcacttgccaataatagtttagcaattgatcatacgatatttttgctggatcaaaggtaatctcaacagcttcagtatggccagtcgtacctgaacagacttgctcatatgttggattagcaacatgaccaccagtataaccagaaactactttttctactccgtcaactgtatcgaaaggttcgaccatgcaccaaaaacaaccgccagcgaagattgctgtgtcgttgttgggttttgccttggtatcagtggttttggcttgtttattattctctgtcattctttgaaatacctccattttatttgaattttattgcttttttaagttaactagtattatatacaaataaaaatgagatgcactttttattacctgatgtatcccattttatttctttacaaattattgcgtctttcttcaatatccttttcaatctgttctaaatcatcttcgatagcaagatttaaaataaagtttttcgtcgttgacctcttattaatgtaaagcttacgggcctcatttttatcattccactttttatttacttctgtatatttagccattaaaaatcactttccataatgctatagcaatcacaatcaaaacaccagttaacaaagctcttttaggatagaactttaatgaccatttagtatttttgccagtatgagttaattttataggctttcggcatatttgtcacctcttagctccgattctcttagcctcctttcactatatacaacacacgcttttacgtgtaacgcgaatgatatttagaaaaatatgccaaaaagggcatcaatctggccgtctaaagccaaatgatgctttaattgttttttcaccaaaatcaatagcctaacttaatgacactgtttttacataaacttattaaatttataattcttcatattttttgctctttaattaatttgttatcaaaattgaatacaacgattagtagctaagtccttcttacgattaccagattaccaattcatctcgattctattttagatttcttagcatcttttcactatataagtgaacgcaatctccgtgcaccatcaacaatatttttaaataatatacaaaaacagtcactctatagaacatatttttcagagcagctatttagcctccacatgtgtggagaatacttaagcctcatcttttggctgatgtaacgacttggatcacctccacatgtgtggagaatactaaacggctgtggcgttgacacagctcaaagtaggatcacctccacacacgtggagaatacgctaactggataccagtcatcaccgttaacagtaggatcacctccacatgtgtggagaatactctgccttgtctcccgtgcccttcaagatgataggatcacctccacactcgtggagaatacactaaatgatccacgatatatcaacatccctcaatcgaaataatatcatttttaatcacttttaacaaagaccaataataaagccataattacaaaaagccactccaaataaaaaagaagcatttctgcttctttttgaatagttttgctcccaaagtgcccctaggattcaaatttcatttataaatccttatatatcaaggtttaagggctatccattaaacgatttcttgctccttgaagcgaccatatactttttcaacttcactaacactcatgaaagcatacggatctgctccttgcacgatttggcgaatatcatacatatcatatcgatcaataatggtaatcaaaactgtcttttcaatatgactgtatgcaccttcagcatcatgcaaaatggtaattcctctatgcatccggttttgaataccatcgataatatgctgtgggtgctgagtaacaatcattacttgcatcttctggtgttgggtataaaccgcatcaattactcgcccattaataaaaatagtcaaggcggaataaagagcacgtggccaaccaaacatgtatcccgcagcagcgataataatcaaattaataaaaatattaaattttccgtaactaatgcccgttttttgcctaattacaataccaataatgtcgagtccaccagttgaaataccgttctttaatgccatcccagttccaataccgttgatcgaagcaccaaaaatcgcacaaaccagtgggtccaggtgcatctgccaaggttgaatagcgtgcatcatgatagaacctagaacaacagcaacgatggtgaagaaagtaaatttatgtcctatcttgaaccaagccaatataaataaaggaaagttcaaaagaaagtacatcattgatgttgataatgtaaacggtagatatctttcacttacagtattaattaattgcgcaaaacccgtgattcctgacgagtacatatgccccggcgtccaaaaaaagttcaaggcaactgcaaccgcaattgaataaaagaaggcagctgacaattttgaaagaaaattgtagcgtcggttgaacttatcaagttgatccatagtttgtcaaatcctttgagcaaatactaatagtaaacacattaattttaacaaaagttttgctgctgaccaatctaaatagacatttttatcacttttgttaatcggagcaaaaaatgatactattcagttaatattaattagtctatccaaatagaaaggtgtctttcatgagttcttactatgaattaatgtggcgtgacgatgaactaacttcttataccactgacaagctgaattttatctacaacgcaatcgatcatcccttgtctgtccgctatagacagttatatcctaatcgattagactggcaaaaagccgtaaacagacacaatgcagctattcaaaaagtcaaagaccttcttattgaaagaaaagatagtcataatatacgtgaagcttggtttaaactggatcccaatgcacgaactaaagcaaacaatggttttactgttgaacaactagctaataagttcccttacatggcaaaacaacttggtgcctttatggaaattgaaaacatcgaaatcaaatactttgatggagaatttaagcctagatatgacttagatgatttttctgatattttttctgccaattatcccactagtggctttaaacaaagtggcattactcaagaagctttactgaagctctaccctaacatcagtgctaaaaatttagaccaaattttaaaaatggccgactgtgaattagagcaagaaaatggcactgaagttattccttattggtatgctgtcaatgctaaaagaatgctaatcgatggtgatagttttgctgcaacctttgacgactaaaaaactgaccgcttggtcagtctttttattggataatttgaacaccgtgttcatcaggatgtaagattaatgtctcatcttttaaatcatgtttacgtaagcccgacaaaaatccagctacatgtttatcttcaatccacgtcataatcgttgaacctgcgccgctcaaataagttgccaaggcatgttttgaatgagctacctcccgcacttttacaagttctggcactagtttttctcggtaaacttcatggaatacatcttgttccattaattctcctgctttagggtagtcttgagcaaacaaactagcaattaaagtattagcaactgctgagccatgcgtagctacgccaaaagctaattctttaggcaaaactgctctagctgtcttagtttccaaattataatcgggtacataagccaccaacgcatatggaggaagtggtgcttcaactgcatcaaaatgatggttaacttcagcaccaacaaccaagccgcccaaaatagtcggtgcaatattatcaggatgtccctcgattttagctcctaattgaaccttttcttcatctgatagtcccagcttaccaatttgattagccaattcaattccggctgcgatagcacttgaactgctacctaaaccatgagccaatgggatattgcttttaacgcgtaaatgaagcggtggtaaccctggataaactgttagtgcagtcttaacaattaaatttttttcatcatgtggaattcctttcatcacatgatccacctgaaagcgatcggctaagcttaaaacttctacttccaaataaagtgaaacagccatgccaagtgaatcaaagccaggacccaagtttgccgttgaagctggtgctttaataatcattttttcccttcctttactgcaaaatcttatagctagcttttaaatattgatcttgaatcgctaaatcttgtagctgctgtcgactaatattttcggttacaactacaattcttgattgtacttgtttaatctcacgaaccggaatttccaaatcagagagtaatttactcaaatcaaacaaggtctcttctgcttcgaaagataaataataggaatacttcacatcctccgaacttgttaattgcataacatgggagaaattactaaatggctgaccggtggtctttttcactacgttttttatttcagtaatcacatcactcatgactgaattagccgttgcagagctacccgcacctgggcctgtgaatactgctgttcctaggctttggctcttaatttgtaaagcatttagttcatttttaatatgcgccataatcgcattttctggcaacaaacatggagcaacttctacaaataatttaccattaatatttttggcaatcccaatcagcttaatgacatagcctaacttctgagcctgtttaatgtcaaaatcctttagattattaatcccttgaatagtaaaatcatcaatactaatcttagtaccaaaagcaaacttgcttaaaattacaatcttgtatgctgcatccttacctgtaacatcgttagtgggatcagcctccgcaaagcccagctcttgagcatttttcagcgcttcctcgtagcttagtcccttttcccccatttgtgacaaaatataattcgtcgtaccattaataattccttgaatttcggaaataatgtcactggaataagaggtagccaaggtccgcaaaatagggatcccacctgcaacgctagcatcatacattaaatcacactttttacttgcagctaaattaatcaattctgaaccaaaagttgccattaagtctttattggccgtaactacattttttccagcattgattgctgcagtaatatattccttagcaggatgaagcccacctattaattcaactataattttaatttcgggatcttgcaaaatcgaatcgaaatctgtagttagcatcacttcgttagctaaattacgatgtttttctggattacgtactagagctttttcaatgatgatttcttcaccacttgtttgtctaatcttctttttattatttttaattatttttaaaacacctgaaccaactgttcctaatccaagcaatgcaattttgatggccatttgatcttatcctctttttaatgattttcttatttttacgattgtatcataggtgctaatcaaggtacaatagttataatattaatatttcataagataggaagattgtttatgcaatatcgtagtactagaggttcaaaagaaaacactttaactgcacctcaagcaattattcaaggcttggctcaagacggtgggctttacgtgcctgttgcctttcctcaagctaattttaagttagaagatttatccaaactttcctacaagcaaatcgctgccatggttattagcttattctttgatgactttactaaggagcaaatcaccactgcagttcaaagcgcttatagtgaacaatgggatgatcgcagcattgttccaatcgaaaagcacgataaccatttttacatggagctttttcacggtcctacccttgccttcaaagatatagctttgcaaatgttgccacaattaatgaccagagctgttcaaattgaaaagattgataaagatattattattttaaccgctacttctggcgatactggtacggcatcaatgcgtggctttgctaatcaaaagggtaccgatgtcatagtcttttatcctgaaggtggcgttagtcctgttcaacttaagcaaatgctcagccaacgcggcaacaatttgcgtgcaattgcaatcaaaggtaactttgacgatgctcaaactgaagttaaaaaaatcttcaacaatgattctttcaaaaaccgacttaatgctaatggctatcaattttcttcagctaattcgatgaatattggtcgtctggttccgcaaatttcttactacctctacacctatggacaattagtacgcagacaagaaattaaactaggagacgaagttaactttgctgtgccaacaggtaactttggtgacatcctagctggatattatgctaagaaattaggtttgcctattaaaaagttgatttgtgcatctaatgaaaacaatgtattgactgatttctttaataatggtgtctacgataagcgacgtaagttccatttaaccaatgcaccagcaatggatatcctagtttccagcaatttggaacgacttttatttgacctttatggcgaaaataactatgaagtcgctagtttaatgaatcaattgactcaacgcggtcattatcaagttagcggtgaagttttcactaaattacaaaaaaattttgcagctggttttgcaacagaagaagaggttaaatcagaaatcaaacgggtctacaattatgaccgctatgtaattgatccacatactgctgttggctcttttgtagcaaatcaatatcaaaagaagaccggcgatcaaaccccaatggtcattgtttcaacagccagtccatataagttcccagaaacggtgtatgaagccatcactggtggtcctagtatgcaaactggcgtcggtgcaattaaagaattgcatgatgaattaggcggtcaattatcaatcggtgtgcgtgccctttttgatcgtgaacccaagaccgaaaaaattattgaaccaaatgatatggaaaaagaaatcagttcaattttagatttgaaataataattaaggaaaaatagatatgaaagttgttaaatttggaggttcttccctagcctcaggtaatagcgtagataaggccctaagtattattaatgccgatcccgaaagacaagtcgttgtagtctcagcaccgggcaaaagaactgaggatgatattaaagtaaccgatctaatgatcacttacgcatatatgagcttgaggagtaataattatcaagacatcgctacccgtatttttaagcgttatgaattaattgcccaatattttgagctgcctgaagcagaattagaggatattaaccagcttctacttacattgccgaagctaagttaccctaataatgactaccgcatggcaacctttaaagcacacggagaacgtcttaatgcaattttgattgctaaaattttaaatcatcaaggaattaaagcacgatttttagagccaaaagatgtaggtttaattgtcactggcacttctaataatgctgaagtcaatcctgaaacttatgtgaacttaaaaagaattaaggctgcaaaagatgaaaagatcatttttcctggcttctatggcattacaccatcaggacatattgctactttctctcgcggtggttctgacattaccggtgctattctagctagggggttaaacgctgatctttatgaaaacttcaccgatgtcgatgctattttttcagccaatccccatatcgttgatcagcccaagccaattaaaagaatgacttatcaagaaatgcgggaactatcttatgcgggattttccgtctttcacgatgaagccttaattcctgctattcaaggcgaaattcctgtcaatgttaaaaatactaatgctccagaaaaacctgggacaatgatcgtaccagaggacggctttatacctaaacacacaatcacaggtattgccggaggcaaaaacttcgcggccctttatttaagaaaatatatgttaaataaaggtgctggtttcaccttgaagttaatggaaattttgcaaaaacatcatgtttcatatgaacatatgccatctggaattgatgatattaccattattttcaaaaaagatgtcttaactgatcaattaattgatgttatctgtaatgaaattcaaactagtctaaatcctgatcaaatgcagtggattgatgattatgcaatcacaatggtggtaggtgaagggatgaaggacaagctgactttatgtgctagcttgctttaccctcttggtaaaaagaacatctccattcaaatgattaaccagggtgcatcccaaatctcaattatgattggtaccagacggcaagatgaagaagtagttatcaaaaccatttatgataatttcattgctcaggataaaatttaacataagctataatataacaaataaaaaaatggtaaatctggttattagtaccttgatttaccatttttactttatgagattatctttttactaaaaagtaactactttatactccaaatatttttctccatcaaagttcattttcacaataaatggattctttggctggatcatagcaaaggcttcatatttaaagcttggatcatagtaattaattactgatccaattgctgtaccatgtccaccaataatcatagtttgatcttgatatttggacaaaactagcttcaaagcagcaacatttctcttctgcgtctcttttaaagactcgccatttcttagcttataatcaaaatcttcccactgtctttcacaatattcatgaaaattagaaatccactcatcaccaatttttctttctctaaagtcagaaatagatgataatgttagtttcttctcgtctataactggttgaattgtatcaattgcacgcttgaatggactagaaaaagcttggtcgatgtgtttatctctaaagtaatcagttactttttttctatcttgcaaccccttttctgtcaaaggacgtgttaaatcatcatgaactgataaatcaggttgagcatgtcttacaaaatatactgttgtcataattttctccaaagcgataacagagactgtaaaatagtttgtgtaaggatgaatgattccttaaatttatttctttaaacattagaaaaaggagttcctttctcgtatgattggtttgaacaaaaaaacacatacagaaagaagaactccttcatgaatgattttaccaaagattttgctcaagctctattcaatccagacaaaataaatgatttattgcgcaaagagctacaacaggctgttaataacttgttagaagctgaattgactgcctttctgggctatgatccctatgccagaaatggctggaatactggcaactctagaaatggtgcttatttccgcaaagttgatacgcaatttggcccaattgaagtgcaagtgcctcgggatcgcaacggtcaatttcatcagcacacgctgcctgactacaagcagcactctgatgttttggaaagcacgattatcaagctctactccaagggcgtgaccaccagggaaatagccgatctaattgaaaagatgtatggcagccattacagtccagctcaggtatcaaatatttccaagcagatgattccaaaggttgaggcttaccacaaacgcaagctaagcgacaagtttttctgcgtctatttggatgcgacataccttcctttgcgccgagaaacatttgagcgtgaagcagtctatattgccattggcatcaagcctaatgggcacaaggaggtcattgactactgcattgcacctagcgagaacattgaagtctggacagatatgcttcaaaacatgaaatcccgaggcttgaagcaagttgaactctttctttctgatggtgttgttggcatgaaaacagccttggccaggacttatcctaaagctcattttcaacgctgcttggttcatgtcatgcgcaatatctgtgctaaagtccgggtggatgaccgcgaaaagatcatgaacgaattcaagcagatacatcaacagacaagcaaaaaagaagctgcagctgtcttgcacaaattctatgccagatggaataaagcttatagcaatgtcatcaaaggtttgaaggaaattgagcccgatctgctggtcttctacaattatcccaaacaaatcagagcttcaatttattcaaccaatatgattgaatcctttaacaacgtcatcaagcgtaaagctaagcctaaggcagaatttccaactgaacagtcgcttgatgcatttattggcatccaggcaatgagctacaatgaccgctatttcaaccgaattcataaaggctttggtcaggttcaggataccttagaatcttattttgaataaataattaaaaaatcaatttgcgagaaagaactatttacacaaaagatttgacagtttccgataacatattattatacgcgtggtgctagttaaatcgttctagacaataagccaaattataagctaaaattgcaatttccaaccggctttgaaagcctatcagactacgtgctcgattgttctcggcattgtaataggtcagaagcgaaaagtcgctttcaattgttctgcgaatagccatcaattgatgatcattgtgctttttagctcctgtcatatttttacgatatggtgtccaaagttcataacccatttgttttagctgttgatgcagttctttgcctaaatagccttcgtcgccaagaagatagtaattagatggatgggtattttccatcagttcaactgtctccctggcatcatgaactgatgcttttgttacgacataatcaagaatgtaaccgtcatcgctaacaatgacatgaactttgaaaccatagaagtaaattttcttggtggccttataaccaatgttggcataaccgcgaaaaattttagcacgatagttgcgaattggttggcaaacaggtaccggaaagctgtcaatgatcaagaactgtccattcaggtcaacctttttattcatttcttgccgtatctgataaatcaattgcaatagctgacgtgaacgtcgattaaaacgtgagtgtgataaacaattgaaacattcacagaatcttctttgtgattcaattcctgtcttagcttgccagataagtaaagccaaaatcagactgtccgtagttttaatttgatcaatatttcgccgatgagtaaactcagccggtgcatacaaacgataccagtgccgacaaattatcactaaatctttaaaactaacttgtaaatggtggctaaaacgcttaagcttaaggcagttcaatcagatcagactcttttctttttgatactacaacttgagtctagtccgattggacttttttattaactaaaacgatttaactagcaccacgcgtattattatatttttacttccgttatttgaatcagattttacttaatctaattcataaattcaataataaattaacttttccttgctctaatccaatttttcacgatacactaaaagcaaatgtttgtatactcacgaaaggattttatatgggattagaaatactaaatcatactgatcaaaaactaatttccaatgccgatttttggcaattagttgattttcaaagagagtcaaataaattctctgagtttaaaggcgtttcctttgtttctaatattaaatttattgagcaaaatcttataccacgttttgaccagatcacactaattcttggactaaccgataatggatcaaattcaattggcaaaagaattgaccaaattttaaataaacgtcgtgatttgattgaatatagctacgaacaccaagatagtcccttcactaaacgtattttagatggtagtttacagctttttttcaccaaacagaatttgattcacactaagctttatttaatggaaaatcaaagcaagtactctgccttttcaggttcaatgaatcttaccgatacggctgttaataaaaatatggaacaattagtttgggattacggcaatacttctgatccattattcaattgctatcaacaaatgtttcaagataaccttaatcaggctacaacttatattaatgctaaaaaactatctggttatttagaagacaaaaataaagacgatcttcgcattcatgtaatgcaagattcttctcttgaaatcaaaaacagtcctaattcaactggtaaagacataattattctcccagctgaagagataaaaaagtatcgcgaccactacagcaaagatgatgaattaaagaaattatctgaaaatgaaaaactcgttgcttctcaaacagttactttatttggtgaaggtggcaataaaagacgtaagctagatacaatcgggcaagatttatatagcttgactcagcacattattcgtcaagacaaaaaggcaaaagcagatacatcacaaattgaaaaagaagaagatctcttccctgttcctgttcagttttacaataatggtcaattattccaagcctctaaaattggtgataacatcccttctgaagttattacttctgatttaactgaagggcaattaaaaaatgcgcttcaacttttctgtgatatcactcatgaatataatacttacaaagaagttggtgaaggctggcaagcttgtgactttatgctgtttctatatgaatcaccatggctttggaaaatccgcaatttatatgaattatctggaagcaatgtatctagagaagacgtgcctattgctacagcactaatcggacaaggtcgaactggtaagtccaccctagggaaaagactagccgctaaattaattggtgctcataatttcttagatagtggaatgatggatccaaagaattatgcccttggcaagagtaatatcaatatgacaattaccaacacgctaagtgactatgtatatacaaatggtcctgtaagtccattaatgattgatgatgtcagtcccgagcttacaacccgtacttactttgaaagattcatcaaggaagttactaacaatcgtaatttaactcatccctcaccagcattcattttcacgatgaatagacaagaaagctctattaaatcacaattttctctaaagcctgaaattatgcgtcgtttatggtatttaagctttgaatctactttttcaggtgaaagtgatcaacgtaatgctgcattaactagcttatttagtcgtgcaaatgatgatctttttaaatattgtcaagttgaattagcaaaattctttactaacgttagtgttgaagatgcgcagaagattgaaagagacttcttatatccaatcaagcatgttttaaaaactgcacttgataaatttgatatgtataaccaagtcagcaaatattttgaagaaaattacgattactccctatttgttggtcgaaatgattggggaatgttaatcaatcaagcaaaaatcggaagcgatatcttatttattaaacaagatgaccggctaaaagcccaaatcaataaagaacttttcaataaaatctccgatcaaacggcgaaaaacagcggttctactatgcttgatcgctactttaaatatttgcctagaaaatatcacattgcatcgcaacaaactagcaccggttttattattgatgttgaaaactttgataaatggcttgatgatgatacgttaatgaataagtatcaaaacagtagttcatttagagataagcaacaaagagataaccaagcacaattgactcaaacagttgatatgctagctaaggcaatgttagaagatcgtgaacagcgacgaaaagaagaggctaaaaagaaacgaagctggcttggtaattttttccacagaaattagtttataaaagatttcatattcaaaataagacttttaacctcttaacagttaaaagtcttatttactatagggataataatgtttggactttgattgatattcttttacagaaattatcttattttgatcattaaattctataattgatacaccatcgaattcactaatttttccttgataattacatttaaaatgccattcggcaatgctcgtatcaccattaattatgagtctttctattggccaagcaattacttttccttgtttattccaattttcaaaccaagatattatctcctttttatttctgtaaactggaccatagcattcactataaatagcattttcgtcaaatgtattttggactacttcaagattaggacttagccatgctcgaaaataatttctaattatttgctctttatccatttatagcgatgtccagcctttcttgtgaaaatggttaaacaagtttttattttctcttaaaagttgcaaaatattttgtttatcatctactacaatattcttatcttgtaacaaacccataatcgaatttagttgctgatagtcgacatttccaagtgtcaaagtcatatttgttcccttacctaaatccaaaatcaaatttaaataatcaggattaaagtcaataggactaagacgtacatttttacgatagacaacggcagctttctttacatcagataaattaataacttgcttactctttttatgtaaccctagcagttgcatcaattttatcacatcgttaatatcataatttataattgtaatattttcgctactaatctgccaatacggattaaaacaagtaggtaaagttacaaatacacctaaaattagtacaataaggaatagccaccaagcttgataaccaaatcctgtcaaaaatagtgaaagtaaaactaccacaatcataccgattaaaacatggctcaatttaacaggagttccaacaataatttttttcatcacgttcaccttcttactttacttcctatataatattataaagcgctttcaaaaaataaactatagaggttaaaaatatgaaaataggtattattcaagctacatcgcaaaaaagtaaaaatttcatattagagaagtatatcaaagaatctgtaggatccaatgatcaagtattcaattttggtatttatcaagatagttcggctagtctatcttacgtgcaagtttccctagctgtcgcattattaattaatagcaaggcgactgacttcattgtgacaggatgtacttctggacaaggaatgatgcttgcatgaaatacttttcctaatattcaatgtggttatatccccactccacaagatgcttttctttttggtcatatcaataacggcaatgttgtctcctttccactaggacttaattggggttggagtggtgaaatcaattttgagcagactataaaaaatctttttgaacagccttggggacaaggttatcctccttcacaagcaaaaagaaagataagaaatgctcaagaagttaaaaatctcaacgtaattagtaagaaatcaatgattgacattatacctaaaattgatcctgatcttattttccctgtgctcaattatgaaccgatttataacttcataattaaaaacggaaccgatcaaaaattaatttcaattatcaaaaggataaaaaatgactacaaaaattgaaaaaatatctcctaaaatctacaaagtaactgataacgataagcatctaggcactatttctacttatcacaatctttttcataacaaatatatttatctaaaattcaatctaagtgattactctgtaaatattccattttcaaaaatagttcaagcagagcaccaagcattgcaagtcatgattgattcaaatgaaaatccaatcgtagattttttattaagaaatggttttatctgcaaacgacactgttatacgcttaccgttaacaaaaaagatttaaaaattgagatcaataacaaattatctcttcattttttcaatacagaaagtcccgattacgaaactgtcaaatcttttgtgtaaatagttctttctcgtaaattgattttttaattatttatttaatcaaagtaggattctaaggtgtcctgaacctgaccaaagcctttatgaattcgattgaaataacggtcattgtagctcattgcctgaatgccaataaaagcatcaagcgactgttcagttggaaactctgccttaggcttagctttgcgcttgatcacattgttaaatgattcaatcatgttagtcgaataaattgaagctctgatctgcttgggatagttataaaagaccagcagatctggttctatgtctttcaagcttctgataacatggctgtaaaccttgccccatttggtatagaagtcatgcaggacagctgtggcttcttctttgtttgtctgttgatgcacctgtttgaattcgttcatgatcttttcacgatcgtcgacgcgtactttagcgcagatattgcgcatgacatgaaccaaacagcgttgaaaatgagctttaggataagtcctggccaaggctgttttcatgccaacaacaccatcagaaagaaaaagctcaacttgctttaagcctcgggatttcatgttttgaagcatatctgtccagacttcaatgttctcgctaggcgcaatgcagtagtcaatgacctccttgtgcccattaggcttgatgccaatggcaatatagactgcttcacgctcaaatgtttctcggcgcaaaggaaggtatgtcgcatccaaatagacgcagaaaaacttgtcgcttagcttgcgtttgtggtaagcctcaacctttggaatcatctgcttggaaatatttgatacctgagctggactgtaatggctgccatacatcttttcaattagatcggctatttccctggtggtcacgcccttggggtaaagcttgataatcatgctttccaagatatccgagtgctgcttgtagccaggcagcgtgtgctgatgaaattgaccgttgcgatcccgaggcacttgcacttcaattgggccaaattgcgtatcaactttgcggaaataagcaccatttctagagttgccagtattccagccatttctggcatagggatcatagcccagaaaggcagtcaattcagcttctaacaagttattaacagcctgttgtagctctttgcgcaataaatcatttattttgtctggattgaatagagcttgagcaaaatctttggtaaaatcattcatgaaggagttcttctttctgtatgtgtttttttgttcaaaccaatcatacgagaaaggaactcctttttctaatgtttaaagaaataaatttaaggaatcattcatccttacacaaactattttacagtctatgcatctgtgcaacagtatgctttttcccgtcataataatatcgcttaacaattttatctctaacttgatcatttaagtcttgtacctgagcctgctgctgataatcaactaaagcactcacaccatagtcaactaacataatcagaaaagcaagaacattgattaaaataaacttagtccaattacgacttaaaaggatattcgtctcttcttgtacaacgtaagtattggtaattgataaagcaggaataataatccaaccaattgcagttaaccagaaacgaactggattggttttaataaaagctttcaaattcatcttactttatcccctttcttactttttaatttaatttcttgatcaaattttgcttttaattctggcgtaaagttgtgagcaatcatcaaaatagtttgatctgttttgagcaattcatcaatgattttttcggtagctttttgatcgatcgcactagttacttcatccattaaaacaaacgattgctcgtgtatttccgttcgcgctaaaacaactttttgccgttgtccaccagacaaattttcactttttagatcaattgttgtattaacaccatctggcattttggctaagtcggattggagttgaactgcttgaacaacatcttgaagcttatcctgcaaattttcgttaaacattgtaatgttctctttgatcgttgcgggaaaaactactggattttgcggcatattgccaattctagcttttccttcaggaatgatagtttcattttcatctagataggtcaccgtaccagattcaggttttagcttacctaacaaaacattaaacaaggttgattttcctgttcctgaatcgccagtaagcaaaactttctgccctttttttattgtaaaatcaggataaaaaattgtttccccctgatcgtattttacagacaagcctgaaactttaagaccgtaggctgatactttatctttattttcatcaggaacttgctttcttaaatcggtaatctgttcgcgtaaagccttagttgacttaacttgcgttaacgactgagtaatattccaaattgctgaaaaaatcgtaaatgcaaaaccactagcaactgcaaaatcaccgaatgaaatcatattaagcaaaaatatgattccagcaataaagctcataccaatttgtgcaattgaattgctaaaagcattaatcaaataacttacacttcttaattttgcactacccttacttgcgtccacataatcactacttgatcgatgaatttgcttaaccaaacgactgtatgcactataacgacgtagttcctgcaatccaccaagccaatgagcaattgtatttaacagcttttcattctttttatttactttatctgtggcagctgatgttttcttctccataattttaggagcaaaaagtgtaatcacagctaaaatggcagtaaccaaaattagaatccagttcatgcttgctagtaaaacaatagcaatcacaatctctaaaaccccacttaagatagtaatccaaggtgtagcataatcatctgataagatttttaaattggctgttaatcggttctgcatactagagactttttcatcacttttttcataatagtaatgatgcatgatttcttgccgaattttatgcagatagttttgcgtctgcctagtgaaaacaacggtagtaattggtaaaagcaacgaagtgaataatgctaaaacaaactgcattatttgccaataaacatatgtattaaaattaccagcagtaattgaattcagagcatatttaaataaatattcactaaaactcccaaataatgcgtataaaacatacaataagataataatgcaggctcgaaacgagactgtaaaatagtttgtgtaaggatgaatgattccttaaatttatttctttaaacattagaaaaaggagttcctttctcgtatgattggtttgaacaaaaaaacacatacagaaagaagaactccttcatgaatgattttaccaaagattttgctcaagctctattcaatccagacaaaataaatgatttattgcgcaaagagctacaacaggctgttaataacttgttagaagctgaattgactgcctttctgggctatgatccctatgccagaaatggctggaatactggcaactctagaaatggtgcttatttccgcaaagttgatacgcaatttggcccaattgaagtgcaagtgcctcgggatcgcaacggtcaatttcatcagcacacgctgcctggctacaagcagcactcggatatcttggaaagcatgattatcaagctttactccaagggcgtgaccaccagggaaatagccgatctaattgaaaagatgtatggcagccattacagtccagctcaggtatcaaatatttccaagcagatgattccaaaggttgaggcttaccacaaacgcaagctaagcgacaagtttttctgcgtctatttggatgcgacataccttcctttgcgccgagaaacatttgagcgtgaagcagtctatattgccattggcatcaagcctaatgggcacaaggaggtcattgactactgcattgcacctagcgagaacattgaagtctggacagatatgcttcaaaacatgaaatcccgaggcttaaagcaagttgagctttttctttctgatggtgttgttggcatgaaaacagccttggccaggacttatcctaaagctcattttcaacgctgtttggttcatgtcatgcgcaatatctgcgctaaagtacgcgtcgacgatcgtgaaaagatcatgaatgaattcaagcaaatccatcaacagccaaataaagaagctgcgatcaaagtcttgcacgccttctatgacaagtggaacagagcgtacaaccatgtcatcagagatctcaaagagattgagcctgatctgctggtcttttacagctatcctaagcagatcagggcttcaatttactccaccaatatgatcgaatcctttaacaacgttatcaagcgtaaagctaaacctaaagcagagtttccaaatgaacagtcgcttgatacttttattggcattcaagcaatgagctacaacgaacgctatttcaatcgaatccacaaaggcttcggtcaggttcaggataccttagaatcctactttgattaaataaaagattaaaaaatcaatctacgagaaaaatctatttacacaaaagatttgacagtttcctcgaaacacattgcttttaaatagctcttttaaactcatacttctcctccattaatcattaataaaaatatttatcatcctttaatcttactacacaaaaataattttttacacatatttttttaatttttaagctaaatcatatttcataaacataaaataagactagtaatcaattcaaattgactactagtctctttgtttaccaaaaactacatttttcgcaaaacgtcgatcaatacacgacgtaagtcttcgttcttcttacccatttcttcgatcaatctagctttatcatctaaagcctgattatatttatcttgcaaagcattatatctttgctccagttgattgtaatttctgattactgtattgtagcgttcacgcaaaccgctagcttcatcaaattcataattattccgattatcataattatttcgattattatagcggcggttagactgattattacgtgagcggttattattttctcttctgatctcaaaaggatgcttattttgtcgcttacgttgattttgcgtttgattattattatttcgattattgctattcttctgattattcttacgctcaaagtccttagattgaccttcacgactttcattctgatccttagaatgttgctcaggcttttctttagtttctgtttccttattttcagccgctttttcagcattcttgcgatacttttgatcaatcttgatattttgataaaaaggactaagttcagctataactttttcaccatcttcaaccgaaaaacttccccgcttgttaactggcttaataaagttggtcttcacaattgaagcaatcttatcctctaatttcttttgaatagatttatcaatcttatcattctttataactttagctaaaatcttacgcttagtaattgtcttaacccgcttagatttagaagctggcctcttatcagtagcatcctctttagctggggcttccttagcacgacgttcaattgcatctgcgtaatcttgtacattaccaataattaatttagcaacagccggcttaaaatattttcttcttcgcacagtaatacttggttgtttacgtgtacgcacaaagttataaattttaatctttagtttttgttgtaattctttacttgcattaggcaacaattgatcaatcatttgattcattgttaccatttcatttaaatcaatattttgttgttctaataatgtttgctctactattcctggcatttccaatcctatattcttttaattttttcacaacaaaaaggaccattacggcctattttgcaataatacatcaattttctcattaataaacttaatgcactttccattttacaacattaacgctatttacgaaaagggctacaagcatattctctattttttaaccaaaacaagcagcatcccatcgatactgctttattttatgcgcagttgcactagactttgactctatttctattttacgtgctaaccagccttttgagactgtaaaatagtttgtgtaaggatgaatgattccttaaatttatttctttaaacattagaaaaaggagttcctttctcgtatgattggtttgaacaaaaaaacacatacagaaagaagaactccttcatgaatgattttaccaaaaatatagcacaagctctattcaatcaagacaaaataaatgatttattgcgcaaagagctacaacaggctgttaataacttgttagaagctgaattgactgcctttctgggctatgatccctatgccagaaatggctggaatactggcaactctagaaatggtgcttatttccgcaaagttgatacgcaatttggcccaattgaagtgcaagtgccccgggatcgcaacggtcaatttcatcagcacacgctgcctggctacaagcagcactcggatatcttggaaagcatgattatcaagctttactccaagggcgtgaccaccagggaaatagccgatctaattgaaaagatgtatggcagccattacagtccagctcaggtatcaaatatttccaagcagatgattccaaaggttgaggcttaccacaaacgcaagctaagcgacaagtttttctgcgtctatttggatgcgacataccttcctttgcgccgagaaacatttgagcgtgaagcagtctatattgccattggcatcaagcctaatgggcacaaggaggtcattgactactgcattgcgcctagcgagaacattgaagtctggacagatatgcttcaaaacatgaaatcccgaggcttaaagcaagttgagctttttctttctgatggtgttgttggcatgaaaacagccttggccaggacttatcctaaagctcattttcaacgctgtttggttcatgtcatgcgcaatatctgcgctaaagtacgcgtcgacgatcgtgaaaagatcatgaacgaattcaaacaggtgcatcaacagacaaacaaagaagaagccacagctgtcctgcatgacttctataccaaatggggcaaggtttacagccatgttatcagaagcttgaaagacatagaaccagatctgctggtcttttataactatcccaagcagatcagagcttcaatttattcgactaacatgattgaatcatttaacaatgtgatcaagcgcaaagctaagcctaaggcagagtttccaactgaacagtcgcttgatgcttttattggcattcaggcaatgagctacaatgaccgttatttcaatcgaattcataaaggctttggtcaggttcaggacaccttagaatcctactttgattaaataaataattaaaaaatcaatttacgagaaagaactatttacacaaaagatttgacagtttcagccttttttctagttttattttcttaactaatccattaggttttacatataaattcttaatattatttcgctattataagatcaattaagatgaaaggaatgagaaccttgattaaactactcttaattggtggatcatttttaacgcttggtttaatggccatcagctcagtattaattaataaaccagcagtagcaaaggtaaaacatcgccactaaaaaccagaataatatatgttaataaatcttttcccctctaactagaaagaccaggttatgtactccacatagcctggtcttcttttcgtcttattctttatggttggtagaaaattgcaccttggtcaacaattacatctggttgcaacttacgtaaactcttactttcaacacaatattttgtattattcaaatactctttgaagttcttagtttccaagtgctgcttgtaagcttcattattacgataaacttcaatagctaaccattcatttggttgatcggcaacagttcctgcaatcattgccaaaatatctttttcttcttcgactgccgttttcatttctttcattacagcatgagcaaactcatcgcccttacctaaagaaacaccaatttcagtcagataaataacataatcatttgatccggtaactgctagtttttctgcctttgtagaaataaattccggaaacaattctacctttactcgactagttaaaatatctttagcaacgtcagtaaaatccttaaattgctttgaattagcatgagtatcataacttgcttcgtcttgatagcattctactacaaaattagtagtttcttcgtcatgacttgtctgcataaacaatgtgcctggttcgttttcttgagaagtaagcatattatgttgccctgccttaacgaactttgcatgatcctctttattagtttctagtttatataaacgcaaaattggtgtttgttttaatttcataacttctcctccaagaattaattttgtcattattatactaaattttatcgcgtctattagtaaaaaacatcccttagttaagggatgtcacaaaactataacgtgtaattaactttcttaaacttgtagtccttcatttttttagctaatttcttgcttctgaagtagttaccaccatcatatctactagaataaaccagcacgttatgctttttaccattaatggtttgtggtaccactcgataaagactccaattttcaaaagtaatccacggatcaatctcatagaatgtatcattcttcattttggtagttttaccagacatccagttttgcgttaccttatcaaagttcttctggttagcaattctaccattgaagtaatcactaattgtcgaagcctcctgggtaaatattggtttgccattaacagtatgttcagtaaaggtgatctttgtgccattatgtgcattacgatcataagagtaccaagtaccctgcatcttttttggaatagtaacctgtacaccattaccataagttgaagcatcaacagtctcaacttgactagccaaaccagttaatcctaaaacaagtaccattgatgttaaaggtaacaaagttctttttagcataaaaatcatctccagaatgtaaaatatatgagtccgctttcataatatattttacagtatcttatagtacttagacaagatatttttaactttacagattaatattcttgctgcaatagctttataaactcactacttaacgctgaatttgacttataaaaagccattatcttttgctttattaactgaccatgatcaagcaagaaaagtggctgcaaatctgtagtattaattaacctagccgtattctcatttaaaataaaatagccagacctagaggcgaccaacagtgctgcttcttcgaccgagttagaagcgatgaattgactgccaatttgatacaaatctttaaataaatgtagctcactaacctcttcttcaggtttagccacaataaaacaagtcatatcattgagctcgtctttttcaatcatttgaatgccattaggatacattcccttgggcaaaattgccattacaccagcttgagtcaattctgtttcatcaaagttaagattctcgtcacgcaaatcattgattgctatgtctgcttcatcttcattcagttttgcaaaagcaccatcatgactagtcgcaagtagttttacatctacattaggatgttttaacacaaaatgctgcactgcctgatctaattccttacgacctaattggtcaaaatatgcaatctttaattccgtcattttatttttcatccagcggtgcgtgtccttcttctgctactcttcttttatccttagtatcttcatgcttattaagtgccatcaaggcaaaaaagatcaaattcaaaccactaactacaatgccaaataattttattaaattgagtttcttttctttactcattttttaacctcacaactaaaaataatcataaaatgatacatcgcctttaacgaaatctaattttttgatgcggtaatctgtaattaatcctagtttaacagcagcattcatggttagtctacctaatagcacctgggtccacgcggtaattgatcccgaaaaatcaaccaatgcatcttccttacgttctaccgctaccttacgtccatgattacttaattgccaaactccaatattccaaggacactgttcatcgctattgacttccagattaaaatcaccttcttgcattggccgcatacaagccaaaactttttcaaaatcaataattcgactcatcatataaggacgcaaatcaacttggagttcgttttgttcaggaaaaagttcagctcgtaacgatttctctggtacgctcattttaaattgcttaacactgcccgcgtgcgaacccataaaaccaaacatactcagtaatccctgcggcgtaattgcgtacatttcatcagctaaaaaagtattgtctctaatgcgataaatcaagtaactaattggccgctcatccgcgtcaaaataaacggctacattgcggtgatgataataagaatcaagtctattccaccaccatgcctcacgtacaaccgtgttacgttcatcatcagtatgcagttgacgttcataaagttgaatcacaccattttgaacagctaaattgtcccacttgccacgcactatatgaccagaacgtggtaatttaaaactacgcaatgcgcttccatcaaagcgatattctttttgataaatactattgctaaacccgtactggcgataaaagctctccgaaaatggtgccaggttagcaaacggaatatcttgcctatgtaagtcatgcaaaatttctttcattaattgggaaatatgaccttggccacgatactcaggatatgaagctacataacctattccagccatcggtaaatgatgcccaaaaacatcacttttaaatcgattaaccataatatagctagctaatttttccttatcaaaatagccataacctgtactatgatcataacgactcataaaattttcgtctttagtcaaatcattatttttcaaaaatgcatattgaattaatgccgtaatttgctttaaattattcttatttttctttaattccatgcttattcctatacgtacatctataaatttattcattactattttagttcattttttaaatttttaactagatttttcataaaaataaaccggaatcataaaatcccggtttattttacgcaacgtattcttgataaagctgagagataaatgcctgcatctgttccactgaatgtctccggctacgagcacattctttagcagggcgatcacataaaaagcacttacgtggctgcctgcccaaatctctgcgtgaaattgcagcttgtttattttttaccaacacgtctgcatcaaagagacgtcccaatgatatctgattctcaaaatcaattgttgagcgctttactttttcaattgacaaagataatacataaaagttttcacagccactatcatcattaagctgtgtcaccaatttaaaatgataacctaggttagtccaagcattttccagctcattgatacccaacataaacattttagttaaatagcgattattcttgattggtcctgggatattcatattaatgtcgactagagtttgattaggatacttattaaaaatcttatgttgtacagctactcgcctatctttagctgctaaaacttgggcaatatcctgcttttttccttcattaaaaatattcatttttatcacccagttaattataaatgattgtgccgactccgtctgctagtttgttggcattgctcaaagaggtgataattgctaaattacctgttttttctacaaattcaattgcagcttctatcttaggcttcatactcccagctgcgaaataacctgctgctagatattgtttgagctgttcaacttttattttaccaattgcttgttgattttctttgccataattcaaaaatgcatgatccaccgttgttagaattactaattcatcagcgttgatatcttctgccattttagcagcggaaaaatctttatgaattacgccggcaacacctctgagatgcccatctttcacaataacaaggatgccaccaccgccacaggcaatcggaataaataaatttcctaaagtagccgccatcactgctttaattgaatgcaatcgattttcagcttctgtaaattgccaagcatactttgaattaaagacctcatcagttacttccatctcatttaagccatatttttcatagatttcttctcccacctgagttgttcgatcatgaaaagctgtcaaacaatgcataaagatcaattggtcatctggtgtaccagtcatttgcatcattttcattgtgaccgtatatggctttaataatttaattcgttcagaccaatcattttcacccatcgaaaccccaacatcggtataaacaacattggctcctttaacgccttgagcaatatcatctgtgatcaaattttttgaacctgaatcttgggcaaaattttgagcaattttttgtacatcaggatgtgtaaacaaaggcttgggtgtaacaatatgtacattaacacctaacattgagccacaaactaaaagactgtcggcaacattatcgcggccatcacccacttccaaacaggaacgccagaatatttagccagctcttctacatcttcttgagcaaaaccgcgatattcaattccatcatacattgagcctaggactttagccgtatccttgacgctttcttttttacctaagtggatctcgcttgcgcctagatattctggatgagcacctaaatcattacaagctactacaaaagcagatcgcgtcctagttgaggctttttcaaaaagtagtgcaatatttttacctttcagatattcatgtgggatatgctcttttttaagttcttttaaatgtaatgcaaaatcaattaaatatgaaatttcagctggagtatagtctttacaatcgagaaaacttctaccttgaaaaacattttgtaaatatttcattttttgcctcttataaatcttcacgaatcaacggacacgacatacatctaggaccgccacgaccacgtgagagttcactagaccgaatctcatgaacgatgatgccatgttttcttagcaaatcattggatacataattacgatcataagtaacgacttcacctggtgcaattgccaaggtatttgagccgtcattccattgttcacgtggtgcggcaattggatcaccaccaccagttggaattaaatccaattcgcttaaatgtaagttttctttcaaaacctgcaccaaatcattcttttctgtgatttttacaccgttgtgatcatcgggctgtagaacataaatatcaattttgccggctttatctaaaataaagggatgaaccgtaaattgattataattaatcattgtaaaaactatatcaaggtgcatcatagcatgattgtgcggaatcttaatcgctaaaatcgtatcataacttgaatgatcaaataaattatgagctaagtcagtaattgcagttgcagaagtgcgttgtgaaatacctacagctaacacatggttatttagaactagttcatccccgccctcaaggcgaccatgatgataacggtcacgccaaactggaatagttgcgttcttgaaatcaggatgatttttcaaaattgtttccataaataatgattcacgtcgtctagctctgaaagtcatccggttaatggtcatccctgaaccaattgcagcctgttgatctcgagtaaaatatacatttggcattggatcaagataaaaagggtaatctgggtcctcagccaaatctgctaaagatggggtagaattatgaatcgcactttttctaattccagcaatcaccgtttttaccatttccttagttagcaattcttggagatagttcagcaataattgatgcaaaggatcctgttttttaatacttgattcatccagtaactgatctaagaatgcccgacgaactttctcatctgttaaagattctgctaataaatcctcaagatataatactttgatcccctgctgcctcaatacatgcgcaaaagcatcatgttcttcttgggcaatcttcagataaggaatatcgtcaatcaacattcgatgcaaaatatctggggctagattttctagttcttttcccggtcgatgtaacatcaccgtttttaacttaccaatttctgaataaacatgaatcggactcgacattcaaccaccttctattaattattgtacccgtttacatttattatggatcaattaggtaaaagttacagtattatcatattgcagcaatgatttttttcattaaaggtgtaacttgatgatctttacgccaaaccagctgcaaatgtgttatccaattagcatgtttaattgcgatcatattttcttgggcataagttgtcgcaattgattctggtactagcgctactcccatttttctcttggcccaagtaattgctgtccgtgaatcatcacacttaaccgcataaaatggtttaagcccatgatgtgcaaaagtttgattaaaaatatcctcaaagcgacgataaataatcaatggctgatctgctagatctttaatgcgtaattcttttttttgctgaaaatctgggtctacactaatagccatcattttttcagttgttaaagtcttagtatttaaacctgtctggttgtaaggcgttcgtacaatgcctagatcgattgtctttttttctaatttatccaggatgccataagtattatcttcataaatatcaaaagaaatttccggataatattttcgtaattcattaaaagaattcattggtatcaagcccgttgaggaagatgccattccaattgcaatcgttcccaattcaccggaaatagtcttatgtacttggttttcagcattttgagctagagaaataatttcattggcatagctttgaaaaatttgtcccacatcagttagctcaataccatgtgccgttcttttaaataattgcgcgcccaactctttctctaattgttttaattgatagcttaatggtggctgtgcaatatacaagcgcttagcagctgctgtaatctgcttttcttctgctacaactagaaaataacgtaactgttttagattcatattatttatcctttttttatttcaattgatagtgatattaaaatatttaatatcttatattgtattttagtattttattcatagcaatatctgtgctaccttattaaggtagatttggagggaaaataatgtctgataaatttcacggcttaactcaagccgaagcagacaagcgcttaaaagaagatagcttaaatgaagtaccagagcctgaatacaatttctttaaagagttcttgtctaagttatggaacctatccgcttggattctagaagctgctttaattctagaatgtatcttgggcaaatgggtccaatcattattcgtgttgttgatgcttttatttgctgcatttaacggtgcatctaagaaaaagcaatcaagacgagttttaaataatatttcacacaagttgactcctactgtatcagttgaacgcgatggcaagtggatcaaacttgattctaaacaactagttaaaggcgatttaatctcacttaaacgcggggacgtactcgcagcagatgttaaaattgttgacggtaacttagcttgtgatgaaagctcaattacaggtgaatctaaaccagttaagaaagcaattgatgacaccgcctttgccggtactacagttgttgaaggtgatggcctagctgttgttactgctacaggtaaagattctagaagcggtaagacgattaatttgatcaacaattccgctgctcctggtcacttacaacaacttttgactaagattatctactacctttgcttactagatggtgttttaaccttagttattattatcgcctccttcttcaaaggcggtaatttcaatacctttattaatatgttgccattcctggcaatgatgtttattgcttcaattcctgtagcaatgccatcaacttttgctttatccaactcatttgaagcaacccgcttaagtaaagaaggagtcctgacttctgacctaactggaattcaggacgcagctaacttgaacttgcttttacttgataagactggaacaattacggaaaacaaaactgccgtagccgcttggactgatctaagtgacttgcctgacaaagacgtgcttgctttagctggagccgcaactgataaacgtaatgctggtattatcgatacagcaatcgatgaatacttagtagaaaataacattccagtcatgaatgctgaaaactttactccatttacttctgacactggttattctatggctgatgttgctggacataatgtaaagcttggttcatttaagcaattatctttgatcgataaacatgccgatgaagaaatttctggaattaatttcaaggcaggacgctcagtggcagtcttgattgacgataagttagctggtgtcttcatcttacaagataaagttagaacagactctaaagcagctttggctgaactcaagaaacgtggcgttcgcccaattatgttaactggtgacaatcaaaagaccgctgctgcagtggcagaacaagttgatttaactggtaaagtaatttcgattcacgatttcaatgaaaatactgatattaatgatttggccggtattgctgatgttttaccagaagataaactcaagatggtaaagcttttccaagaaaaaggctatatcgtagggatgacaggtgacggagttaacgacgcgcctgcattaaaacaagctgaagtaggaatcgcagtttcaaatgctgctgacgtagctaagcgttcgggtaaaatggtattactagacgatggtctaggctcaattgttaaaattttagacgctggacatcgcgtataccaaagaatgactacttggtcactaaccaagcttgctagaactgctgaattaacgatgctgttaacttttggctatcttttctttgactacatcccaatggccttgaatgcaatggttatctataccattatgaacaatatggttacgatgatgattggaactgacaggactcacattacttataagccagaaaactggaatatggctaagcttgctaagatcgccttttcactagctgctggttggactttaattggtattgggtttgtttggttcttaaacacacacggttggagtcacggtgctgtttctactatggtttacgtatacctagttcttagcgcaatgttgattgttttgattactagaactcgtaagtacttttggcaagattacccatccaagttggttggtagtgttcaaattgcagatgttctattgacctttatcttagctctttgtggttgggcaatggtccagatttccattcaaaacttagcaattactgtaattgtagcgattattgctgccataataatcgacttaatttaccaacctgtgatgaaaaacaggtagattattaccataaattttataaattaaaagacttctaggaactttgaactcttagaagtcttttaatttatctttttgattcacgatatcctgctgcacgtgctgctgctttactcttgaagaaaactgcattttcacgattcattcgataattatgaccgcgcattacgtgaaagatttttgatcgtttattatcaacaattctgtaattactggtataaatcttagttttatcacgatattgatgctttctccttctgtgatgaatagctgcattaacaactgatgtcgacccctgcaaatttgcaggcagaacactgatttctcccactaacatcagaaatgcaacaatagtcacaacccaattcttgcatcttttcataaaaacactcccttaatatgtcactatatttatatagtatacgtttatatatgaagtgttcctacgtttattagaaactagtttgaaactgtcaaatcttttgtgtaaatagatctttctcgtaaattgattttttaattatttatttaatcaaagtaggattctaaggtgtcctgaacctgaccaaagcctttatgaattcgattgaaataacggtcattgtagctcattgcctgaatgccaataaaagcatcaagcgactgttcagttggaaactctgccttaggcttagctttgcgcttgatcacattgttaaatgattcaatcatgttagtcgaataaattgaagctctgatctgcttgggatagttataaaagaccagcagatctggttctatgtctttcaagcttctgataacatggctgtaaaccttgccccatttggtatagaagtcatgcaggacagctgtggcttcttctttgtttgtctgttgatgcacctgtttgaattcgttcatgatcttttcacgatcgtcgacgcgtactttagcgcagatattgcgcatgacatgaaccaaacagcgttgaaaatgagctttaggataagtcctggccaaggctgttttcatgccaacaacaccatcagaaagaaaaagctcaacttgctttaagcctcgggatttcatgttttgaagcatatctgtccagacttcaatgttctcgctaggcgcaatgcagtagtcaatgacctccttgtgcccattaggcttgatgccaatggcaatatagactgcttcacgctcaaatgtttctcggcgcaaaggaaggtatgtcgcatccaaatagacgcagaaaaacttgtcgcttagcttgcgtttgtggtaagcctcaacctttggaatcatctgcttggaaatatttgatacctgagctggactgtaatggctgccatacatcttttcaattagatcggctatttccctggtggtcacgcccttggagtaaagcttgataatcatgctttccaagatatccgagtgctgcttgtagccaggcagcgtgtgctgatgaaattgaccgttgcgatcccggggcacttgcacttcaattgggccaaattgcgtatcaactttgcggaaataagcaccatttctagagttgccagtattccagccatttctggcatagggatcatagcccagaaaggcagtcaattcagcttctaacaagttattaacagcctgttgtagctctttgcgcaataaatcatttattttgtctggattgaatagagcttgagcaaaatctttggtaaaatcattcatgaaggagttcttctttctgtatgtgtttttttgttcaaaccaatcatacgagaaaggaactcctttttctaatgtttaaagaaataaatttaaggaatcattcatccttacacaaactattttacagtctcactagtttaattacttatcttcatttgcaccaaaaatatccaaaaattgtaaaaacaagttaacaaaatcaagatataattgcaaagcacctaaaactgcaagcccattagttgaaagatcatcaccatattgtaaataaatatctttcattctttgtgcatcccacgcagttaaaatagtaaatataatcacagcaataatcgaaaaaacgtagtcaatgattggattatgtaaaaacaaattagctaacatggctacaatcaacccaattaacgcagcagaagcataagaccctattcgactcaaatcttttttggtaattgttcctaaaatcgccattgttacaaagacggttgccgaagctacaaatgctgaagcaatattttgtccactatatgcacctgcaataaaagcaaaggtaacgccgtaaacaattggtgttgtgcaataaaggcagagataggtcccgcaaaaaccgtcattgtcaaataagcactaattgctgaaacgaaaaccgctaaggccatataaccatatattttgctaaaaaacatttaatcctgaatcattagcatattgctgttgaccagattcttgatcaaaattatccatcttaatttctccttcttaacacataccctgtactttaaatataacacctgtttaattaaaaacgtagcgagacaccctaccaaaatataaactatctcggtcactttggactagacctacaataaaaaatatcatataattggtatagacaattatcaaaaatgaggtactattatgacaatgagatctttaggtctgtcaatttatccaggccacagcaaatttgaaggcaacgctcactatctggacttagctcacaaatatggcttttctcgtatcttcatgagtatgcttgaagtacaaggcagccctgaagaaaccaaagctaagtataaaaaaatcattgaatatggcaataaattgggatttcaaacttttttagatgttaatcctgcaatcttcaaacaactaggtgtcagctatgatgacctgaaattttttgctgatattggtgcagcaggcatccgtcttgacacaacatttgatggtgcaattgaagcaatgctttcttacaacccatatggtctaatcattgaactcaacatgagtaataatgttgactatcttaacaatattatttcttaccaagctaatacaccgtttatttatggctgtcacaatttttatcctcaacgcggtactggcttaccttacgacttctttatcgcttgttctgaacgcttcaaaaagtttggcattcattcagccgcttttgtctcaagtcaagtaggtcaaatgggaccttggaacgtggaagatggtttaccaacgcttgagcaagaccgtaatttaccaattgatgtgcaagcaatgcatctctgggcttctgggttgattgatgatgtaatcatcggtaatgcttatgccagtgaagccgagttaaaagccttatctaaagttaatcgctatcaattgatgttgcacgtaaactacgttactgatgttaataagattgagaaaactatcgtagaagcgcctcaacatttccgtcgtggtgatatcactaaggatgtaattcgttcaaccatgccccgtgtaacttatgcagatattcctaatccagtacacgacaacaatgtagaattccaacgcggagatattatcattggtaacgacaactttggtcattacaaaaatgaactacaaattgtccttgaacctcataaggagtcaaggatgaacaaagtcggttctattagatcagacgaattattcctgctcgactttattaaaccatggtcaaaatttaaattaatcggtaacaaataataaacattctaagctaaatagtgaattagttatccgacgggataattgattcactatttttattcttttgtagaattaaagtagtggtaaaacgatatgccctgaggtctttagacacttgatgtcgcataataaactggcagttttacttaagttttcaatagtctcttcgaagaatgtggacactagatgtcgagtttagaaaattagatctgatttcttaagtaaatacgttttactactaagttttggaggtttttattatgcaagttacttttggaattgatgtaagcaagtctacttctactgtttgtgaactaattggtgaaagcaaaaatgaactaaccattactaataatcgtcctggttttattcaattgcttcatgaattaaccgctttttctaaacatccgcaaattatttttgaagctaccggtgtttattcacgcagactgcaggcttttcttgaagactacggctatgaatatgttgttattaatccgcttaaagccaaaaaagagatgaatatggggctacgctacaacaagaccgataaaactgatgcttatcatttagctttaattcaaagactttatcgccatccggttaatcaaagcgaatcccaaacttataagcagcttaatgctttgagccgcttctatgaccagctgacaagtgacttggtaatagctaaaaatcgacttcaccaagctctacaatcgacttttcctgaaattgaaaatttattttcttctgctaaaggtaaaaattactggcaaatagttgtgcgatatcctcattgtgacttagtaagaagagaagataaaaaacagcttattaactggttaatgagcttaaaggggattgcttttaaacacgctctaaggactgcagataaattaattgaattagcttatcaagcttatccagttgtatcttgctctagcatagaagtcgagcaagtgcagtattatgcacacagattgcttaatttaagtgatcaaagagaaaatttaatcgcaagaatggttaagttagcgaagtctttgcctaatcatgatttagaaaacctagaaagcattccaggctttgcacagaccactgctgtcagagttttagcagagttaggagatttacgcagatttagtaatcctaataaaatcaatgcttttatcggaattgatccaggcagatatcagtcaggagaaatggactctaatttaagtattactaaacatggcaatgcagtcgcacgtaagttgctttatcgagctattggacaaattgataatgcagctaagacaaatccgtgtcatatagcagattattatgaaagcaaaaagctatcctctcaaaccaaagggttcaaaaagatagctattgcttcaattcataaactaatcagaaccatttatgccctgattatcaatgatcaaccatatgattacaacgtagccacacataatcaaaaagactttagtcgtaattaattgatcaagtacattataacgctaagcccaaaaatcagatatggatctgggcttatttgtcgtgtctaactaaaaaaataaatcgacactaaaagatgtttaagttgaaatttaaacaaaaaatgaagccaaacttcttattatgcttgactttacgtagaaaaagacctaaaagtgtctaacttttaggtctcagttcaaattgatttaattccctctttttatttattctattttaagcaccatgatattgaacaagtgaataaatatcaacatcaggtaatttatctctaccgtgtaaatctggcaattcgatgtagaatgcggcaccaactaacttaccaccaaggttttcaattagctctttagaagctcttaaagtacctgcggtagccatcaagtcatcacagacaaccactctttgtccaggtttaatcgcatccttgtgcatttccaaactgtttgaaccatattccaaatcataggaagcacgttcaacttctcttggtaacttatgtggctttcttgcaggtacaaaacctaaacctaactcagtagctactggacaacctacaataaaaccacgtgcttcaggcccaacaattacatctgcttttttactctttgcatattccgctaattcatgagtagcggcacgatacaattcaccatcttgcaaaattggtgtaatatcgcgaaaaacaatgcctttgttaggaaaatccttaacacttgcaatatatttactaaaatcaactgccataagaagcataacctccaaaatgctctgtgtttgtgttcaaacgcttttgaccagtatattttaacaaattttaacgataaaagcactgaaaacagaatagttatctatttatttgtcaaattattaacatatgtaatcaaacgttgactaggcatagttcttagttgattaacaaatttaatctgagaagaagttcccattaaatatttagaagctgtcagcggctgttttttaggagaaggctctcctaccaatttaccttcatccaattttacaaagcctaattcaaagaaaactcgtaaaatgaaaagcacactatcataatctagtcccaaataaggtgcaactgtacggtaatctgctggctttaacgtagggtgactataaatatattttaaaacagcaccaaaataatttttagcgggaatttgttcaacaggcaattgatcaagcaaaaagcgtaaatagatttgttgataatctttctccaatgcagcatttaattcaatctgattgcgtggcacatctaataatgcaactgtttcaccagtttgatcataatctttaactaaagagatcttgtcttcatcgatctgtagtcggttgcgaacaatcggaatatttttttgatcaaataacaggtagcggtccgcgaaacccataacatatttctcttggcgtaagtcaacaactggcgttggcactgccaattttggtgaagcaaaagctagtccggtcatgattccttgtaaagaaacttgatttcgataagtatttaatgataattgaacaaaaatttgagaaataaacggcaaaagattattattcaaaaagcctttattaaatccaataactgataagttaccgccttttttagcaaccgtaaatttgacatgattcttatctttacccattttaaagaaatgagtgattgttggattagagatactaaagattggctgcgtgtcacctgtcccaaatggacctacttgattgatttgtgctagtgtctgcggagttaagccctgcataggcaattccatgtcatattttttagtctcaagaccaccttcaacatgaaagtcatcttcaaatttttcccgtaatggcgcaatctgattttcttctaatgataaaccacaggcaaaatcatggccaccaaatttggttaaatattgatccttgatcggatttaaagcatcaaacaagttgaaaccagcaaaggacctacctgagcctttaacctcacctgcatcatttttagtcaaaacaatcgtgggtttatgtgtcttttcaacgatcttattagctactaaacctaacacaccttcgtgaaattcagggtcatataaaaccaaagtattttgtttttgccagctatttttatgaattaacgtcatacatttgtcatagacttcggtggttaattctttccgtttattgtttaattcttcgatcttatctgcaattttttgggcctcaaggtcatcatcacttagcaaaagctcaactgccaagttggcattatctaatcgacctacagcatttaatcgaggagcaatattaaagccgacatcagtttcattaatactgcctaaagtcaaaccagcatttttgattagagcgcgcaagccaggacgatctgtctgattaagcatttctaaaccacgcttaacgataatatgcccctctccggtcaccttaaccatatcgccaatagttccgatcatagccaaatctagcagctcaggcatagtatcctgcattagaccacgacaaatcgtgtaagctactccggcaccacaataatcatcaaaaggatatttttggccaggataattacaatgaacagtagcataagctgccggtttcttttcttgaaaagtatgatgatctgtaatgattacatcaacattatgttcttgagcatatttgacttcctcgaccccagtaacaccattatcaacagtgataatcaatctggttccatcagctacaatatcttgatagcggtccatattaggaccatacccatcattgaagcgattaggaataaaataatgaacatcagcgcccaaaatgcttagggtttcagtcataatagtcgttgcagtaattccatcagcatcataatcgccataaattgtaatcttttcgccgctatcaattgcttgattaattcggttaattgccttatccatgtcatgcattaacgctggatcagccagattttcttctgttgcattaaaccaaaaatcaagtttttcgtctgtattaataccccgcaatgcaaaaagtttggctgcaatgggacctagttgatatttctcaatcaagtctggtgctaattcatcagctgttctttcttgccatttcattaattatcaaacaccttatgttctctcatcaaaacgaaaaggcactcattgttgagtgtctttattacaaaatctatttataattttatcgcaaatctaaatctgattaaagattgtaaatttttattttaatttaaaaaccttaagattattgttgttagccttttcagttttaatcagattaccccgaattgcccaacgattcttaccgccatcagcacaagtaatcaaagttacaatattcttcttagtattatcgactagccaaaccgcagttggatcaacaatctttttcatataaattcgatagacatatactttgttaagattagttaaataaactaactcaccttttttaacatcttcaagtggtgagaaaagaataccttttgctgtcatgtagtgacctgcaagaggataatttcccttacccattacttggtcggctcgcatcgtgccgccaccagtcgacattgcatcatcactcatccccaacataatcggtaaatacatattaacatcgggaatagctaacgcaccaatcgcaccagaagtctttttcacttgtgatcttgctgcttgtgcaatgcctaaagacttaactttactaaaatcatacattccttttttctttttgttttcttcaattgtctttctatttattccacttaaagtagattgttgattatgatgaattaattgatcactgatctgtttgttaaatatcaaagcaataccaacaagcaataatatgatagcagcaactctaagtaaaattgtacttacactattttttttatttttagccatttttatttaccgttgatgtcatcatcgttcatcttcaagactgccatgaaagcatcttgaggtacttcaactctaccaactgctttcattcgcttcttaccacgtttctgtttttcaagcagcttagcccgacgatctggatcaccagtatggattttccaggtaacatcttttcggtatggcttaattgtagctcgagaaataattttagctccaattgcgccctgaatatcaacttcaaagttttgccgtggaattagtttttttagcattgaagtcatttgacgggcacgatcttgagcttctgatctgtgagcaataaaactcaatgcatcaattggctccttgttaagcaaaatgtcgatcttaaccaaatcagtagcacgataacccgtaatttcataatcaagtgaagcataacctttagtcgaagatttcaaatcatcaaagaaatcaaaaataatttcagctaatggcatgttgtaaattacattaactcggtacttatccaagtaatccatggtaacgaattcaccacgcttacgttgacaaagctccattactggaccaacaaaatcatttggcaccataatttccgcttttacataaggttcttgaacttccttatattcaccagcatctggcaaatcagatggattatcaatcaccttggttgttccatcattcataattgcatgataatcaacagatggtgctgtcatgattagatcaaggtcaaattcttgctctaatctttcctgtacaacatccatatgaagtaagcctaagaagccacaacgaaacccaaagcctaaagctgttgaagtttcaggctcaaattctaaagctgcatcattcagctgtagtttttgtaaagcttccttcaaatcttcataatcacggttgtcaactgggtacatcccagaataaaccatcggtggaatttgacgatagcctggaagtggttcagccgttggattatcagcttgagtaattgtgtcaccaacacgtgtttctcgaacggacttaatgttagcagtaatatatcctacatcccctgcgattaaaatatccttcttaattggatgaggactagaaacaccaacctctgtgacttcatattccttgccagtattcataatttgaattcgatcgcctggtttaatagatccatcttcaattttgacagacattaccactccgcgataatcatcatatttagagtcgaaaatcaatgcttttaatggagcagtaatatcaccagacggagctggaatatctttaactaccttttccagcatgtccttaataccttgaccggttttacctgaaacttcggcagcttctgaagcatccaaacctaacatttcttcaatttcttccttagtcttaggaacatcggcagatggtaagtcaatcttgttaattactggcaagattgccaaatcgtcatcaattgccaaataagtattagccaaagtttgagcctgtacaccttgagaagcatcaaccaccattaaagcaccttcacaggcagctagagaacgtgatacctcatatgaaaagtcaacgtgtcctggtgtatcgattaagtggaaaatgtagtcttcaccgtcttcagcatgatatttcacttcaactgagttcattttaatggtaataccacgttgacgttcaagtggcatatcatctaacatctgatttttaagctgacgttgactaactgtatcagttaattctaagattctgtcagcaatagtcgatttaccatggtcaatatgcgccacaatagcaaaatttcgaatgtgtttttgatagtcttttaatttttttaaatccataaaatcgttcaccctttactatgtattaattatagcaaagctagaataaatgatgaaattgtagcatagtaaattttcaataaaatgcagagtttttagaataataattgaaaattcagcattcctgaattgtcaaattaagtgcaacagttaggctatgaggaaatatattgcttgaagagttcttctgctgtgtgatattgaaggattcgacgatgtttgcggttaatggcatcagttgcctgttgaacataagcagctgacttatctttcatgcttttgcctttagggaagaattgacgcagaagtccattgcagttctcattggtgcctctttcccatggagaatatgggtgggcgaagtagatctggcagcctttgatctcggtcatatccgcaaactcagagccattgtcaaacgtgatcgatttaaaccaggcaggatgtctgtcaatctcattttgaagcagcctttggcatgtgcttgcccgatagtcaggaatcttgataactacttcaaagcgtgtggttctttcggtcaaagtcattaaagcaggctgattcttgcgtctgacgcctttaaccagatctccttcccagtgcagcggcgtttttctgtcttcaatctctttaggacgctgttcaatggaattgccaagatgcttcttgtgcaaagcatgaccgctatggccgtgatgacgcttgttcctgcgtcttttgagcttcataggcagatcaatattgcttatgtccagcaagccctgatcaatatagcgatagacagttggtgtgctgggacaagggtagcctggcatagtccttttgaattcaccaacgaattcatcgatgctggtggcatcaaatttagctttaaagcgtctggagagcattctcaaaaagacagcataatgcttcaatggattgcgctgatagcagtttttgcgacgcttctcataataaatctgtgcagtatcagcgtaatagtgctcatacaataaatagctgctgtctctttgcaggacacttccgcgtttgatttcgcgactgattgtcgacttatggcagccgacttcttgagcgataacagtacgggaagttatgccggaatccagcattgcttgaatttgtccacgttgtacgctggttaattgatgatagtgcttagaaatgctagaatttgaattggtcataaagatcttcctttcttgatttttcgtcacttcaagtttaggtcttcatggcctttttgtttaacacttagtgttgcacttcaattttaaatccgggaaaattcagcattgaatattttccaagaaaaactctaaaaatcaccaaaaaattaattgatcttaaaaaaggtttctgttgcaagtagcagaaacctttttagcatttacatattaaacttatcttttaagcgttcaaaaaatcctttttcttgtggtgtaatattgccaccaccatcatgaacaaagttggtcaaatctttcttttgcttatcattaatgtgctttggaataacaatattaactgtagtaatttgatcaccattgccattaccacgaagatatggcacaccctgtccacgcaaagtaaacttcttattaggttgcgtaccagctggaatagttagctttacatcaccatgcacagtcttaacgttaatttcatctcctaaagtagcctgagcaaatgagattggtacttctgtataaatagtctggccacgacgctcaaaatctttagatggtttaattcgatagttaatatataaatcaccatatggtccgccatttatacctgcttcgccttggccttgatatctaagttgttgaccattgtcgattcccgctggaatatccacttcaatagtattcttacggtcaactgttcctttaccgccacaggttttacatggatactcaataatcacaccacgaccatgacatttgtcacaagtggtttgacgacggatcatgcccaacattgattgttgagtaattgtcatataaccagttccatgacatttatcacaggtaattggatgtgtacctttttcacaaccattaccgccacaagtttcacaagtttcgcttcgagtatagctgacctgggtctttttgcccttaatggcatccataaaatcaattgtcaattgataatccaaatcttggccacgttgtggtgcagttggatcaaccctctgttgacggccttgaccaaaaatatcgccaaagatatcgccaaaatcaccaaagccagaagtatcaaatccggcaccgccaaagccttgaccagctccaccaccaaagccaccttgaccatttacaccagcagaaccaaattgatcatattgcgcacgtttttgcttatcatgcaaaacctcataggcttcgttaacctgcttatacttttcttcagctccaggttcatggtttaaatctgggtgatattttttggctaatttacgatatgccctacttatttcctgatcactggcgtcacgatctacgccaagtactttatagtaatcttcttgtgccatctatttgaactccttgtattctcaaaagaaaagaactactcaatgggtagttcttttctccttttgtttaattataaacccattacttatttggatctactttgtggaattcaccatcttgggcattaccgttgttgccattatttgaattaccaccttgtgggccttgaggacctgcttgtggaccagcttgaccagcagcaccaccattttgttgatacaacttaacagctaagtcttgagcagccttggataaagcatctttcttttctttcatttcatccaagttgttgtccttttgggctttcttcaaagcttcaagagcatcttcaactggcttacgatcgctatcagagagcttatccttagtatctttcaaagtcttatctgtagtaaagattaattgatctacttcgtttctaaggtctgcttcttccttacgcttcttatcttcatcagcgtgttcttcagcatccttttgcatacgtttaatttcttcatctgataaaccggatgaactcttaatagtaatcttttgttccttgccagtacccatatccttagcagatacatttacaataccgttcttatcgatatcgaaggtaacttgaatttgaggaacaccacgtggtgctggtggaatatcagttaactcaaagcggccaagagtcttgtcgtctgcagccattggacgttcaccttgcaatacgtgaacatctacagctggttgattatctgctgcagttgagaagatttgactctttgaagttggaatagtagtgtttctgtcgattaacttagtgaagacaccacccatggtctcaataccaagtgacaatggggtaacatcaagtaaaacaatatccttaacatcacctgagataacaccaccttgaattgctgcacccatagctacagcttcatcagggttaattgaatggtcaggttccttaccagcccattccttaactgccttttgaacagctggaatacgagtagaaccaccatttaaaataaccttgtcaatgtcattaacagtaagacctgcatccttcaatgcattgtcaaatggtaccttagtcttttctaccaagtcagcagttaattcatcaaacttagcacgagttaaatctgcttcaaggtgtaatggaccagcttcgctagcagaaatgaatggaagtgagatgtgagtacttgatacacctgacaagtccttctttgctttttctgcagcatcctttaagcgttgcattgccatcttgtccttcgacaaatcaacaccattttcatccttaaagttcttaattaaccaatccatgatacggtgatcaaagtcatcaccaccaagatgagtatcaccattagttgacaatacttggaagacaccatcacctaattgcaatacagaaacatcaaaagtaccaccaccaaggtcgtatactaagactttttcatcttggtctttatttaaaccgaaggctaatgctgaagcagttggttcgttaataattctttgcacattcaaaccagcaatcttaccagcgtccttagtagcttggcgttgagcatcattgaagtaagcaggaacagtaataacagcatccttaacttcttcacccaagtaatcttctgagaatttcttaatatattgtaaaataaatgctgaaatttcttgtggtgtatattccttatcaccaactttaaccttataatcagcttcacccatgtgacgcttaattgaaacaatggtattagggttggtaatagcttgacgctttgctacctcaccgacttgaacttcaccatctttaaatgcaactactgaaggagtagtccggttaccttctggattagtgataatctttggttctttaccttcaagaactgcaactgctgagttagtagtcccaagatcaatcccaataacttttgacatatattagcttcctctcttattgagcaactacaaccattgctggtcttagtgttctatccttatattgatatcctttttgtaaaacctgaacaacgtgatctttttgatcatcattctcagctgctactgtttgaacagcttgatgtaatgtcggatcaaatttaacgccatcagcctcaatctcaactacaccgtgatctttcattgccttcacaagtgcatccaaggtcatttgcacgcccttctttaactgcttagacacatcatcatcggcctcaacgcttagggctctttccaaattgtccattgctggcaaaatgtccttcgctaagctttgagattcgtacttaattaattgagcacgttctttagtgtagcgattttgcatattttgaatttctgcttcactacgcaaatacttatcttcaagatccttgttcttatcttttaaatcagctaattctttagctaatttttgatcttgtttatttttttcttgcttcttttcttcacctttatcggcttcttttttagccttaggctcagaagtcttttctttttgctctagatttttttcacttggaaattcttctttactcacggctaacctcctttattgaaacttgccataataatcaagcaactttttagctagttcatttctaaaatattcaagcaacccaatcatttgtgaatatggcatattcgttggcccaagtaaagcaatagttcctttaccatgggagccaacgctgtactcagctgtcagcaaactataattttttaataaatcattgggtaattcagatcccaacttaacctttactgaataatttccagactttggatccacctttgcatccattaaattagtgaacagattattatgatcaatcaactcgtacaaagaacgaatgtcatttacatcatgttcagaagtattattgagcaaattaatctgtccatccacatacatctgctcactagctgcatcttttacgacatcttcaactaaactaagcaattcagtcacatgttcgccgcctaattcgtttttagctaattcacttagcaacgaaacgttgatttcatttaggctctttccgactaactgatcattaatcatgcggacagccttttcaatttcttcgccgtgaatattatgtggcaaagcatatacctgattttgaatgttaccatcacttgtaaccaaaattgccataatctgtcgttgagacagcggtacaattctaaatcctgtgactctaacatcatgactctcaggtccttccgcaaatgcggtatagttagttaaatctgacagaattcgtgcagcttcttgtacaatttcatttacttgatgaaaaggtcgatctaattggcttcctattgtattataaacagactctggtaattgcaacggctcaactaaattatcaagataataacgatagccctcgcttgaaggaattcgaccacttgaagagtgagttttttcaattaacccctgctcttccaacacggccatttcatttctaatcgttgcacttgaaactttaattggcaactgcttcattacggtctttgagcctactggctcatgactttgtgtaaagtctgtaattattgtttttaaaataagctcttgacgctcggtcaacatattatatcgccctcacttttagcactcacatctctcaggtgctaacagttaatatgataccagaaattagcactaaatcaagtagattgctaattttattcaaaaaatacgcacttttttcaaagtacgtagcttcttaacccttttgcttaaaataagccctaatttcttgctcatctcgttcaagttgctctttcagttcaggtaatccggcaaattttttctcacctctggtatatttataccatttgatcttcattggcttaccatagacatcttcattaaaatcaaaaatattagattcaatatatatcttcttgtcctgattaatggttacattatagccaacgctagtcatggagttataccacttaccatttactttagtcttggtagcataaactccaattttaggaatcaccttatgttctgcccaaatcaaattagctgttggatagcctagcttatgaccatttcgtttaccatgcccaatgataccactcattacataatggtgccccattaattcagtggctaatttcatctgaccatccttaattgcttgacgaatttcagttgagccaatttttctaccgttaaaagtttgctttggcatcactacaatattaaaacgccctttggaaaattggggtaaattagccatatttgcaatattcttagaaccataagtgtaatcaaagccagcaacaacggtatcagcatttaatctgacaattacattatcgacaaattcttgtgcagaaatttgactgaaatttttagtaaatggtaaaacagccaaataatctactcctaattccgccattttgttagctttttcttccaaagtttctaagtatttaaaatctcgtttcgactcataaacttccttaggatgtcgatcaaaggtcaacacaactaatgacaatttcttctgtaatgcaatttctttagcctgattaattaagcgctgatgtcccaaatgaaccccatcaaaaaagccaagggcaagcacaattctagtagataaaatattttccttaacaggatatgttaaatgaacgattttcacagctaattccttcatttcatttattcattttgcaacagcattaagcttgggcgataaagctttccttttttttcataaattgctttcacctttttattgtatcgtagtgcaacttttttcgcattagtttcaagcgaaatacccgctccatttttaactttaagccacttttcttcagttaaatcaacctgagtgtattccttaaaaaatgcatcaatcggctgtataagttcagtggcctttttcggattctcttcaatctcctttaattttactgcttgtgtaatatcaaagccagaactagctgttcttctcaaataagtcatcgttgcggggcaatctaatttttcacctagatcattaactaacgatctaacataagtgcctttgctgcatttaatcttaaaatcaaagctttcttgcccagtatttatatcaaaaactggttctttagttagatcatattgtttgacttcaacctttctctgaggtcgctcgacttcaatctcttcacgcgcatattcataaagatgtttaccattcactttaacagcagaataaattggaggcacttgaacaatttctcctacaaatttattcatattttcttgaatttctgcaccagaaaaaggctgaatcaactttttttcttttaaaacagttccagttgcatcataactatctgtgctataaccaaatagtcccgtgccaatatattcttttggcctagtatgcatcatttcaattaatttagtagcctgaccaatagcaattggtaaaacgcctgtcacctcaggatcaagcgtaccagcatgtcctatttttctaatatgtaatacgcggcgcaaatgataaactacatctgcactagtcatccctttatctttatcaataactaaaattccgtttaacataattattccctattcttttcaacaaaaaaagggcaccatcacggcgccctcttttttatttgctttcccgcttagcatcttgtttcttaacttctgcaatcaaacggtcaatcttactaccatacaaaactgaattatcacgtttaaaaattaattcaggaaccttataaacagttaatgtttgaccaagcaaatgacgcatcatgccttttgccttttcaaaacctgcctgaacctcttcttccttatgctcatcttcagttagcaggctgtaataaacagttgcatatgaaagatcattcgtacattcaactgcggtaatagttacaccacttaagcgcggatcacgaatattcttttgtaaaatcttggttaattcgcgtagaatttcaccttcaacacgaccaattctatgcttcatgttttcctcctaatagtaattacttaggctcaacttgttgcatttcgtaaacttcgaattcgtcgccaactttaatgtcgttgtagtccttaatcgttaaaccacaatcgttaccttgcttaacttccttaacatcatctttaaatctcttaagtgaagcaatttcaccatcatacttaacgataccatcacgaataactctaatcttagaatcattcttaaccaagcccttatcaacgaaggaaccagcaattgtaccaaccttagaaaccttccaagtttcacgaacagtaagattaccgataaccttttcttcataagttggttcaagcatacccttcatggcagcagtaacatcatcaatagccttgtaaataatgctgtaaagacgaatatctacgccatcggtttcagcttggctcttagcagtagcagttggacgaacgttgaacccaataataaatgcatttgatgcaccagccaaagttacatctgattcattaatggcacctacacctgagtgaatgatatttacacgtacgccttcaacttcaatcttttcaagcgattgttgtaaagcttctacagaaccttgaacatcagccttcaagacaatgtcaacttccttcatgttttccttcttcatagtatcgaagaggttatcaagagttacgtgttgaacattttcacgagacttttgtaaagcttgttgtgctctagcttcaccaacacttctagcggtcttttcatccttaaattcaactaacttatcagcagattcaggcacatcgttcaaaccagtaatttcaacaggttctgatggtgtagccttcttaacttgacgtccacgatcattagtcatagtacgaacacgaccaaaagtgttaccaacaacaatcgggtcaccaacattaagtgtaccttgttggattaaaacgtctgctacaggtccacgaccacgtgacaaacgagcttcaatcacagtaccaattgccatttcagttggattagccttaagttccatcacatcagattgcaacaagatcatttgtaataagtcatcaacattttgacctgtcttagctgaaatattaacgaagatagtatcaccaccgtaatcttcaggaatcaaattgtatttcattaattcctcagttacgtgttgtggatttgcacctggcttatccatcttgttaattgctacaattattggaacattagcactctttgcatggtcaattgcttctacagtttgtggcattacaccatcatctgcagcaacaaccagtacaacaatatcagtaatttcagcaccacgtgcacgcatgttagaaaatgctgcgtgtcctggtgtatccaagaatgtaattaagcgatcatctaatctaacttggtaagcaccaatcttttgagtaataccaccagcttcatgagctgaaacatgagtatgacgaagacgatcaagtaaagtggtcttaccatggtcaacgtgtcccatgattgtaacaactggtgggcgtttaacctggtttttagattcctttgactcttccattctcttgtcatagatattatcaatatcagagatgtcttcatgaactttttgctcagcattgataccatattcagcagctaaaagttcaattgtatctttatccaaagattggttttggttagtcatcacgccaagcatgaagagtttcttaacaatttcagctggttcacggtgaattaacttaccaatatcttgagcgttcataccttcttcgtaaactaatgtttctggtaatggacgttccttacgcttagtaagtgttttctttggcttttgctcttgttgacgttttttattcttacgccgctttctctctgaacgatctgaatggtcactacgaccattgccaaattgatttttacccttgcgtcctggctttcccatgttgcgaccacgattattgccgcgtttttcttccttaggagcctcaggaatagtaacttgaactagttctttagtcgcttcaggctgttgcttcttcaaacgagctggagaaggctttaaaatcttaggaccaataactttcttttctactggttctgctttcttcttgttatctttgtggttgcttgttttcttattatctttcactggctgttcttgttttggatgtcttaattgctcatgatattcttttctggctttttgggcttcacgattaagttgcccttcttctgcccgttgcttttgtttaaattgttgtaacaaagcagctgcctttggcttacctgtattatttctacgatcatttttattctcatgaccgtgattatttgaacgacgtttattattgcgtctcttagaattcttagaactattattatcttcttgcttcttttcatttttgcgaatagaagaaacagagatttttattttattctttttattagaagattttgcagcaggagcggagttttggaaactattctttaactttgcaacctgtgaatcatctactgatgacatgtgattctttacatctaagcctaaatcctttgctttttggactacaactttgttatcaacgccgacttcttttgcgatttcataaattcttttctttgccatccaatcacactccttcatttatttttttaactaacgccttagcaaaaccagcatcagttaatcctaaaactttgcgttttttgccaattgcctttgacaattcaatggcagtaaacatagttatcataggaatattgtcttttctggcagcgcggtttactttttctgccgtgttgtcttgaacatcactagccataataaccgctttgattttgtgcttattaagttcattaatgactgtctctgtaccggtagttaacttaccagcacgctcagctaaacctaacaaattaattgctttttgtctattttgcaatcttatttatcaccaaataattcttttcttgccttttgatgatcaacataagagtaaagctcatcgtaaaaagtatctggaactttcgcacctaaactacgttctaatacattcttctctttagcagcttcaatcttacttggatcaagggaaacatatgcgccgcgaccagcctttttacctgttggatcaactgacacatttttttctttatcgataacaatacgtactaattccttcttgggctgcattgtatcggttaataaatccttccgcattgggatttttctttttttcaaaaaatcacctattcttcagttttatcttctttacttgaatcttctacagtagttgtatcatctgagctttcaacgtcagcagcgtcatctgtactttcaacattttcagaagtttcgctactatctgcagcatcagctgtatcatttgttttttcatctacaaattctacttcagattcaggacgaatatcaatcttatagcttgtcaaacgagcagctaagcgaacgttctgacctttcttaccaattgcaagtgataactggtaatctggtacgataactaaagcacttttttcttcttcatcatcaccaaattgaaccgcaatcacttctgctggatttaatgcattagcaataaagtcagatggatcttcttcatacttaacgatatcaatattttcaccgccaagttcgttaactacattttgtacacgagcacccttttggcctacacaggtacctaccggatcgatgttaggatcatttgacttaacagccatcttagttctgtcacctgcttcacgtgcgattgaaacaatttcaacggttccatcataaatttctggaacttcttgttcaaacaatcgtttaaccatgtcaggagcagttcttgagactgtaatttgtgcacccttgctatcggagccaacatgagttactagtacacgaatctggtcttggggattgtaaacctcatttggcatttgatcacggtgaggcataacagcttcaacattaccaatctttacataaacgaaacgattgtcgcgtctttccacggtaccagtaaccaattcatcttcatattgtgaatattcatcaataatatgttttctttcggcttcacgtagacgttgcatgataacttgcttagcagtttgggcggcaattctaccaaaatttttaggtgttacttcaaaacgaatttcgtcgcctacttcataagcacgattaattgttaaagcatcctttaaactaacttcaagacggtcatcttgcacttcgtcaacaacagttttaactgccattaccttgaagttaccttttctttcatcaaaatcaacttcaacgttttgtgcttgattataattctttttgtatgcagctaccaaagcggctttaattgcatcaacaataatatcttgcttaatgcccttggtattttccaaagtagcaaacgcttctagcatttctttagacataagtttttgatcaacctttctaaaattcaattgcaaaacgaatatttgcaattaacttacggggaacagttaatgtttttcgtcttgtcttatcttttatttctaatacaacttcgtcatcattataagacttgagtgtaccttcatacatttttttattctcaatcttttgataaagaccgacatgaatgtaatcattcagagctttttcccaatcagcttttgttttgattggtcgttctgcccctggagatgataattccaaaacatagggatctggaagtggatcgggatcaagagcatccagcttttcggaaacaagttcacttaaagctgcaatctcatcaatgtcaataccgtttggttggcgatcaacataaatgcgtaaataattttgccctttttctttaacgtattccatatcaaccaacatgtcaccatgttcatcaataattgtttcgacaactggacgaacagaatctataactttagacaaaaattttcctccgtaataaaaagagtgagcatcactgctcactcgaatttacctattcgaacttcatacgtagtataccatgttttacctgatcttgtaaaatttaactatcagaaaagtgataattgattttcatctggcatcccttccaagacaccattttcttcgaaataattcataattgtttgtgatactttaccgcgcttagctaaatcttctttagacaaaaacttcttttctgcacgagcagctacaatctgcttagctgcattatcccccaaaccaggaacagcattgaacggtgctaaaattgtatgcttatctaagatcttaaagtcagttgcttcagattgatcaatatcaaccattttgatcttaatccctcgttctagacattcattagctatttctagcacggtcatcaaactcttatccttagctgatgcatcgtttcctttatcctgaatttccttcattgcagccttaacagtattcttaccatgactcattgcaaccaaatcaaatagatcggcacgaactgaaaagtaagctgtgtaatagatttcaggataatatactttaaaccaagcaattcgtagagccattaaaatgtaagccgtagcgtgagccttagggaacatgtacttgatcttcagacaagaaggaatataccaatctggaatattcttatttttctttaaaatagccatattttcatcgctgatgccacgaccatgacgaacggattccattgttgaaaaggcaacttctggcttaacgccccagtgaattaagtccatcatgatgttgtcacgacaaccaattacatttttcagtttgcaaattccttgattgattaagtcctcagcatttcctagccatacatcagtcccatgggacaaacctgaaatctgtaataattcagaaaatgtcgttggcttagtctcctcaagcattcctctaacaaaacgggtaccaaattctggaacacccaaagttccagtttctgattgaatctgctctggagtaacacctaaaatatcaggactagaaaataatgacatgactccagggtcatcgggtggaatagtcaatggatcaatcccagacaaatcctgcaagtgacgaatcatagttggatcatcatgtcccagaatatcaaacttcaaaatattatcatgaatagagtggaagtcatagtgagtaatcaaccaagcggcatttacatcatcggctggatacgataccggcgtaaaatcgtaaatgtccatatcatcgggcactacaacaattcctgcagggtgttgaccagtagttcttttgacaccacggacaccagctgccaaacggtctaattccgcatttcttagctttaaatcatgctcttcatcgtagtgtttagcataaccgtaagcagtcttatccgcaacagtcgcaatcgttccagcacgatatgaattatctggtccaaacattactcgaataaaattatgggctactggttgatagtcacctgagaagttcaaatcgatatcaggaaccttatcgccgtgaaatcctaagaaagtcgcaaatgggatatcttgtccatctttaactaatggagttccacattttggacaatctttatcaggcaagtcaaaaccagaaccatattccccattttcaaagaattgtgaatacttacagttaggacaacgatagtgtggagctaacggattaacttcagtaattcctgacatcgttgctactagactagagccaacagaaccacgagaacctaccaaatagccatctttatttgacttagctactaaacgctgagaaatcaagtaaataaccgcataaccattcgaaataatggaatttaattccaaatctattcgatccttaacaatcttcggtaatggcttaccatataattcataagccttatcataggtcaacttcttcatttcttcatcggcatgttcaatatgtggtgggtataacccatctttaattggctgaatttctgacaattcatcagcaattttattggtattgtcaataacaattttcttagccacatcttcgcctaagaatgaaaatgcatctagcatttcctgtgttgaatagaaatgcaaatctggctgtggcttatttcgactagggtttgatctctgagccgcaatcaagattttacgataaatagcgtccttttggtcaacgtagtgggcatcgctagttgcaactacaggcttatttaattccttccctaatttaataatattttcaataatttcatgtaattgatcttcatccttaatcaaaccatcagcaattaattgcgaataggttgctggaggttgaacttcaagataatcataaaatttagctttttctcttgcttcgtcgtaacctttttgcatcattgcgataaagacatcgccttgccaacaaccagaaccataaagtaaaccatcatgcaaacgagccaaatctgacttcggcgtacgaggaatacggaaaaagtccttcgtgctggcaattgatactaatttgtaaagattctttaatccagcttgatcctttgccaaaactgtcatatgggaaggacgggctcgtttataaacttcaccatgtgctgcatagccattcaaattattcaaattattttcatgatactttttattaaaagcatctaacaatttaaacattaaatagccagttgcttcagcatcctgatttgcccggtgatggtgttccaaggaaacattatacttcttagctaatgaatctaaagtatggcgactctgctctggatgtagtaaacgcgatacttcaagtgtatcaactactggctgagtaatttcttttagccctgcacgtcttaatgctgcattaacaaacccaacatcaaattgaacgttatgtccacacagtggtcgatcgccataaaagtcttggaattgcttaatgacaactgcttcatcatcggctgcgccaaccatttcatctgtaattgaagtcaaattaatagtttgctcacttaaaggatggtgcggattaatgaacttatcaaagcgttcaagcacttctccgttcttcatcttaaccgcaccaatctcgataattgtgtcgtaaacagatgacaaccccgtagtttcaacgtcaaaaattacaaactcgcggtcttcataggtcatcggtgcaggattcaaaactagtaaagcatgatcatcaatcatattagcttctacaccatacaatattttcatgtccagtgctttaccactgctatatgcttcagggaatgattgaacatcaccatgatcggtaatcgcaattgccttttgtccaaacttcttagcagttttaataaagtccgtcggagtattagttgcgtcaacctgactcatattagtatgaacatgtagttcaactcgtttaggctcaccttcgtatttttcagttcgcccaacatgctcgacagtctctaagctactaatattaaaaactacatcatgtatatattgatcatcagcaactgacccctgcattttagcccaagttcctggtttaattgcagatagctcttcaatttcatctttattagaaacaaatttcttaaatgcaattgaatcactataatccgtaatttcgccagaaaaaatgattgcaccagatttaagctcacgagtttcaacattaaaaatatttccctcaattactacattacgtacgccatcttccagctctttaatttgtgtaattggagcattttcatctaatttacgtttaccataattagtacgtctagttggatactgtttaggttgttgcggtttaggtttgtctggcgtcttctcaaagacttcctgcatgcttttttcatgctcttgttgcaactcctgcaaactttctaaattgtttttagaacttgtctgatccagctgagttataaatttcaaattaaagaagccataatcacgcatcttttcagctaaatcatctaaagccttctgctcaattaaaccatcaatcacattattatcaactggaataacccagcggccatcaacttttttaggtttttggccagccaaaaattcacgagccacaggttgcaaaatatttgaattttgaactacataatgccaataatctggtaaatattgatcagaaccatcagctgttccaacataaaatcttacatttacaaaagaagaaaaagtttcttctacagcttttcttaatgctacataggtgtcatacatcaagggagtatcaaaaaaaacgtggatatcccacctgtgttctttagcgtaaacatccacgttttcaattttccctttttgtagaagcgcattgtcttcaaaactatcaggaaattgaacctgtttgagcaattttaagaaaagatcgtttttatttgccacaaaaattatcctaactcttgatttacaaacttatctaattcatcaattgacatttcggttgctttgtcatcagttggtcgcttaacttcaacaatgccatcagcagccttcttaccaatcgtaattctaattggtgcaccgactaaatctgcatcagcaaacttaacaccagcacgctctttacgatcatcgtataaaacatcatacttttcactgaatttcttttcaagtttttcagctaattcagtttgatcttctttattcatcttcatttgaacaatatgtattgcaaatggagcgatttcctttggccatgcaacaccacgttcagttaagtgttgttcaacagctgctgataacattctagtaacgccaataccgtatgaacccatgatgacaggctttgctttaccattttgatctaagaaatctgcacccatggtcttagtgtaataagtacccaacttgaaaatgtgaccaacttcaattgaagtagtgaacttaagcggtaaatgatcaacaggatctggttcaccttcgttagcagtccgaatatcagcaaattcatccaccttgaaatcacggtctaagttagcattttcaaattgataatcggtttcacctgcaccaactacaacgttgtaaagattcttaacagtttcatctgcaataatcttatcagcccaatctgcattaacaggaccaacgccacccttttcactaccagtgatttcctttaaatcagcagtatttgcttcatgaacctcatcagcgtcaaggatatgacccaacttaacctcattaatttgcttgtcaccacggattaatactaaaactttttggtcatcagcaatgtataaaatacttttaacaattctagtagctggtacatcgaggaatttagctaatttttcaattgtatcgcagcctggcgtagctaccttagttaattgcttagcatcttctggttcttgcttgaaagtatcaatactcttagccatttcaaggttggcagcatatgttcctttttcattagtagcaattgtatcctcaccgatagcagcaggggcttgaaattcagtagagtttttacctcccattgtacctgagtcagcaattacagggtgaacagtaacaccggcacgtttaaagatacgcttatatgcatttttttgatcatcaaattgttcatccaattgatcacgagttgcagcaaaactgtaaccatcaagcattacaaattcacgcccacgaagaaggccaaaacgaggtctattctcatcacgaaacttagtctgaatttgatacaaagcaagtggcatttgtttgtaactctttaagttcttagcaataatttcggtaaaagtttcttcatgtgtaggtccaagcaagctttcacgtccatgacgatcttttaacttgaacatttctgcaccatatttcttgtaacggccactttcttgccacaaagttgcaggaagtaaatgaggcataatcatttctggaacattaattttatccatttcttgttcaatgattccctcagccttgcgtaaaacacggtagcctaatggaagataagcataaactccagctgtgacttgacgaatatacccacctctaatcatcagcttatgactttcagccactgcatctgatggtgcttccttcaaagttggcataaaaaattttgattgacgcattcttatctcctaaagtaaaaaatataattatttaataaaatagcgatagatatcgttacctgtaactgcaataattaaaactaataataagccgaaaccaattaattcaacaattgcctcatgttcttcagaaatcggtttaccgcgaactaattcaattaagttcaataaaagtttaccaccatcaagcccaggaattggaattaaattgacaattcccaaattaatcgaaatcattcctaaaaaggctaatacataagtaaagcccatttgtgaaacttgtgaagtttgagaataaattccaactggacctgataatttattcaaactaaagtggctaaataagttacctacggctctgaaaatcagaccggtagttgaaatagctgtatcccagccacgttttaatttaacaactgcattctcattgctcttagctacaataccaatttgataaactgtttgtttttgaattttatgagcttttggcttaactgtaactttcctaatttgaccatttttctttaattcaaagtgtaagaccttgcctttactttgattaatctgctgtgacacttgatcaaaattattaatcttttgtccattaattgccacaatctgatcaccagtcacaatttttgcatcacgcgctggtgaattagcctgagttgatccaactgtagttgttgctggacctggaactgtaaatgtccagattaaaaatactacaaacccaagaagaatgttcataaaaggtccagcaaaattagttgccaacttttgccaaacattagcttgattaaattgtgtatctcgaggcgcaataattaattcagttccgtttttttcaataatagttgcatcatgagctacgtgataagttactggatcattttcatcgccattttcgtaacccttaattattaaatcgtctactagatcagcctttgttacttgaacgggaattccttcaattggtatttcgctttctgaagcatcaattctcactacttcattttgttcattcaattgtaaaacaaccgtcataccaggatccagcttgctttcatcgtcagcgcctgctaaacgaacatacccaccaagtggtaaccaacgaatggtataagtggtggggttacgtctaatttgaaaaagctttggacccattccaattgagaattctctaaccaaaatacctgactttttggctacgataaaatgcccaaattcatggacaaataccaatataccaaagacgacgataaagattagtatacccttcaataaaaaattctcctaatgaacaatacctaaaattgtagccactactggcaatacaaacagcatactatcaaagcgatccaggataccaccatgacccggcaaaatctttccggaatctttcacaccatagaaacgcttgtaagctgattcaactaaatcacccatttgaccaacaattgataagaaaaaggccagaataatcatcgttaattcagatacaccaaagttaatacccaagctgccaagaattgccatatagatggcactacaaattaaggcacaaacaactgcaccgatcgagccctcccatgttttattaggactaataactggccataatttatgttttccaatcttacgtccaatcatgtaggcaccgatatcagtggaccaaacaacaacaaaaacacaacccagcaatgctaaaccgttttgtgggtatgctctaatggctgccatatagtgaaaacctattccaatgtaaagtgcagccaaaatatatacacctacatcatcaaaagtggttttattctttgaaagaacagtccaggtcaagaacaacataataattccataaaacacacctaatttagtgatatttgaaggaaatactttaaagaatgagtctggaactgtccaggttaaagttgcaagtaaggctaacaaaaaattaaaagaaactaagatttgtttcttcattaaaaagatttcgctaatgccaactgctgcgaataatacagtcagccaatccatccaaaggccacctgcgagcacaattggaataaaaagacataaggcaataattgccgtaattgtacgttgtttcatatttaactatccgattcgtctactttaccaaagcgccggttacggtgcttataatcttctacaaatttttttaaatcattttcatcaaaatctggccaatttttttcgctaaaggcaagttctgaatatgctaattgccataataagaaattagaaattcgctgttcaccggacgttctaattaataaatccggatcttgatatggaccaaagtttttagtcatcaaatggtctgaaatcattttttcagtaatttcttcgctttttagtgaaccagcttcaatcattccaccgagctcctgcatagcagacgtaatttctcttcttgacccgtagttaaaagcaaaattcagaattaagcctgtattattggccgtctctgacattgcacgttgaacaatgcgataagtcttttcaggcaattcatccaaatagcccatgatatttaccttaacattattttccatcaatgttggcatgtatttatcaaaaaagcgaacagggaggttcattaagtaagctacttcttctttaggacgagcccaattctcagtagaaaaagcataaagtgtcaaaactttaattcctaatttatcagcagctaaagtaatccgctcaacattatccattccctctcgatggccaacaaaacgaggtctatgcctcttttttgcccaacgtccattaccatccataataatggctaaatgatttaattcattatccttattactcatctttaaccttgagtaatttccttacgcttttcatcagcaagttggtcaatctgcttagcagcatcatcagttactttttgtacttgcttttctaagttacgttgttcgtcttcagtaatatcaccattcttttcatcttttttcaaagtattcatggcatcacggcgaacatttctcacagcaattttagcttcttccgcaaattttccaacttctttggcaatttcttctcttctttcaccagtgagttgagggattactaatctaattaccttaccatcatttgccggagttaatcctaagtttgaagccaacaatgcatgttcaatatcatctaatgaattttgatcatatggagtaataagcaatacacgtggttcaggaatggtaatactagacatttgagtcaatggagttggtgccccatagtattctacttggacattatcaagaagagcagcgttagcaacacctgcacggatagaagctaatctcttttgataaaccttaatagaatccgtcattttagtttttgctttttcaatagtttcgttattcattatttatcacctctaataacagtaccaatattttcacccaatacaaccttcttgatattgcctggagtattaacgttaaagacaattaatggaatttcagtatccattgaaagtgaacttgcagttctatccatgaccttcaagtcttttgaaattaaatcaagttgagttaattctgagaacttagttgctgaaggatcagtctttggatcagctgagtaaacaccgtcaacaccgtttttagccatcaaaattacatcagcaccaatttcagctgcacgaagggctgcagtagtatcagttgagaagtatggattaccagtaccaccaccaaaaatgactacacgacccttttcaaggtgacgcaaagctcttcttctaatgtaaggctccgcaatctgtctcatttcaattgaagtttgcattctagtaggaacacctattttttcaagaccatcttgcaaagctaaaccattcatgatagttgctaacatacccatgtaatctgcttgagcacgttccatacccaacttagcgccagtttcaccacgccacatgttaccgccaccacagacgataccaatttcaacacctaaatcatgaactgatttgatttctttagctaagtgaccaattacagtaggattaatccccgtacccttgtcacctgctaaagcttcacctgatatttttaaaatgacacgtttatatttaacttgactcataatgacctcctctaatagctttaattattctaccatatctaatgccgcaatgtcttttaacacttaaaacactacaaaatttttacaaaaaaagaaggagcacacggtgtactcctcctttctatgataattatgtaataatgactacttcatttgttcacgaacttcagcagcgaagtcttcttgcttcttttcgataccttcgccaacttcgtaacgttggaaagcaactaacttagcgcctttttccttcaaaaattcgccaacagtcttgctatcgtccataatgtagtcttgtgataacactgcaaattgcttgtcaacttgagtattatcatcaataaagcgttgcatcttaccaggaataattctgtcccaaatcttttctggcttaccttcttctttaagttcagccttgatgtcttccttagccttagccaaaacatcatcagttaattgcttagctgaaccgtaaacaaggtgaggtaatggtttcttatgtaccaatgcacgactttcattgtcttggtcaatcttgtggttcatcacagctaattgatcagtgataaattgatcatctaattcgtctggtgaaataaccttagggctcatagcagcgatgtgcatagccaagtgcttagcagttgcagcatctgcaccttctaaaacagtgataacaccaatttggccaccattgtgttggtaagcaccaaattcttggtcgtcattcttttcttctaaagcaaaacgacgtaaaacaatcttttcaccaattgtagcagttgcgttaacgaatgattggtctaaagtagtaccatcagccatcttcaattccttagctgcttccatatcagctggcttaccttcagcaatagtcttagtagcttcatttaccaagttaacaaacttgtcgttttgagaaacaaagtcagtttctgagttaacttcagtaatagctgccacattaccattaacgtaaacgccagttaaaccttcagctgcaacacggtcagccttcttagctgccttagccatacctttatcacgaaggtattgaacagccttatccatgtcaccgtcaacttctactaatgccttcttagcgtccataacgccagcaccagtacgttcacgtaattctttaactaattttgcagtaatttgtgccattaatagatcctcctacggaactaatagtaaaatctagtcttctgggttttcttcagcgctaacgatttcttctgaaccgtctgcattttccttgaagtcaacttcaactgattcatcatcttgaccttgttgaccttcaacaacagcatcagccatagcaccagcaatcaaacgaatagcacgaatagcgtcatcgtttgatggaataactacgtcgattgggtctggatcagtgttggtatcaaccatagctacaactgggatacccaaaatgttagcttcgtgaacagcaatcttttctttcttagggtctactacgaacaatacatctggaattcttggcatatcttcaataccaccaaagaatttttcaagcttgtccatttccttagttaagagagcaacttccttctttggaagaacatcaaaagtaccatcttctgacatttgctttaattgctttaatctcttaatacggctttgcatagttgaccagttagtcaaagtaccacccaaccaacgttggtttacgtagtattgacctgcacgagttgcttcttcagcaattgaatcttgagcttgcttcttagtacctacaaataagaaaacgccaccgtcttgggcaacagccttcataaagttgtaagcatcatctaacatcttgatagtcttttgcaaatcaatgatgtagataccatttctttgagtgaaaatgtaaggagccatctttgggttccatcttctagtttggtgaccaaagtggacaccagcttcaagcaattgcttcattgtaacaacgtctgccatatttaaattcctcctatggttttatatcctctcaagcgttcatttcatcatctaaccactaccctgggcaccacgatgatgattgctcttgatgtgttttaagtttcatatgctgacacagcatactcaaatattctacaagaaaagattacagtatgcaaggattaaaactttatattatgctcatgcaaaaatttttccttccaagcacgtgaatgatgtttaaaccaatattctcgtttcaaagctaaacgcttatcgtcaaactgttcatgataaatcatccgtacaggacgccgtgttttagtatacttagctccttttcctaaattgtgcattttcaaacgatgttctaaatcattagtaaaaccaccataaaaactgccatcattacacagtaagacataaaagtaatatttaccctgtgcttcatgtttagctttgtcatctgcagtttctcgtgagattcgctgtactaatggagtgaagtcgccatttgattcatgaacttcaacagcatctttcaaaacagttccatcagttccagtatgcttgacggcttctacaataattaaattagcatcttcaccgcgatgtggcacaaatggctgcaccattttgatgcttaagtcatgcttcatacaataataagcaatctcacctaagcgctctggccgatgtaccattaacattttgcctttcattttaagtaagccactagccacttcaattatttgctctaaattaatcaaaagttcatggcgagcaattgcttttttacgatctggattaacttcatgtcccttaggtgctttaaaatatggtggattaactgttactacatcataactatctttccgcaaaaaatgtcctgcatttagcacattatcctgaaaaactgaaatacgattttccatctcattaagcttgactgaacgaactgcttgagaataaacttcgttttgaatttcaattgcatcataatgggcacgattaaaataagccatatagattgtagctgcacaatttcctgcacataaatcagcaaccttatctttatcacggatcaagtctttagcccaatatgctaaaaataatgtatccattgaaaaactaaaagccgttttatcttgaataatacgaagattatcgctatacatgtagtcaattcgctcattatctttcagatctaccataaaaatatttgcctttctcgtcattatatttttataatagcttacatcaaatgaaggaatcaatgaggagacaatgttttacaaaattatacgtccgattgtccgtttcatcgtttgggtgttaaacggtcatctacacattcatcataaggatcgcttgcctcagggcaattatattttagtagccccccaccgtacatggtgggaaccactgctttttgcactaggtgctagtccaatggaattcatgtttatggctaaaattgaattattcaaaaatccggttttacgatttattcttgatcatgctcacgctttcccagtcgatcgaaataaccctggaccatcagccttaaagattccagttaagggacttagagaaggaaagttatcattaattatctttccttcaggcacgcgacattcagctgaattaaaaggtggagttttattaatttccaaaatgtcaaaaaaaccaatggtacctgttgtctaccaaggccctttaacttttaaaggactgcttaagcgcaagccattagaagttaactttggtgatccaattaccattgatcgtaaaactaaactaacccatgaaaatgaacaaattttatttcaacaacttgaagatgcttggaacaaattagataaggaaatggatccaaatttccactacgttgctaaataagtaaaaatcagtataaaacaaatattgctttatactgatttttctttacctgtgcaatttaatataagtgttaaaataatttttaggttttaaatattggaggaaaaagcaattgttagaaaaaactttttacaaaatgatgcttagtaaatctttccccttttctgttaaggtaacctactgggacggtaagagcgaagtttatggcaatggtgatcctgaaattgaaattgtttttaatgaaaagattccaatgagtgaaatcactcgaaatgcttctctagctttgggcgaaggattcatggataaaaaaatcgaaattcatggtaatatccaaaaattgcttgttggtgcttatgaaagtgctgattcattcatgcgtgcttctgagttccgtaagtttatgcctaagcaaaaacacacggaaaagcaaagcgaagaagatattcaaagccactacgacattggtaatgatttctacaagatgtggcttgacccaacaatgacctattcctgcgcccacttcgaagatggcaataaagatgatcttgaacaagctcaaattgcaaaagtacatcatatcttaaacaaactccacccacaaaaaggcaagaccctacttgatatcggatgtggctggggaactctgatgcttactgcagctaaggaatacggtttaaaagtcaccggtgttaccttaagtgaggagcaatttaaattagttcaaaagcgaatctacgacgataacttacaagatgtcgcaaaagttagattacaagaccaccgtgaacttggtgatcaaaaatgggattacattacttcagtgggaatgtttgaacatgttggtaaagaaaacttacctaaatactttgctgatgtctacaagtaccttaacaaagacggtgttgcattaatccatggtattacccgtcaacaaggtggtgccactaatgcttggttaaacaagtatattttccctggtggctacttaccaggcttaccagaaattgttactgacatcatcgattcaggcctacaaattactgatatggaaactcttcgtcgtcattatcaaagaaccttggaaatttgggataagaactttaatgccgttcgtcctgaagtagaaaagaaatttggtgaaagattctgtagaatgtgggatatgtaccttaatgcttgtgctgctagtttcgagtctggtaacatcgacgttatccaatacctattgacaaagggaccatcaggtaaaactttaccgatgactcgtaaatatatgcttgataaataattacatatcaaaaatagtcactagaaattgaaatccagtgactatttttttattcaattttaccaaatagtaatccgttcttctggatcaagccacatgccatcagttggcttaacgttaaatacatcatagaatgcattttgacattgaaccggaatgtttactctcgttggttgtggcgcatggacatccgtttgaacttcagtcttaattgcctcagggcgttgtttctgcatccagctacgagcataattctcaaacaaatctttcaaatccgccccatcattttccccagtttgaactacacaagcaaggccagctagatcagcaatattttcaccaacaacctgcttaccattaatcttagcaggaccatattgtaagccatcaaaaatatcaaccatttgaccaactcgtttattaaactcagcaaaatctttgtcagtccaccaattgttcatatttccatgttcgtcgaattttgctccactattatcaaatgcatgtgatacttcatgcccaatagttgcaccaattccaccataatttgcaccacgagattgattaatgtcataaaatggtgcctgtaaaattccagctggaaaggttaagtcatttctttgcggatcatagcacgcattattcaaattacctggcattagccaaactgaacggtcaactggcttagttaacttattaagcatatatttcgttcgtacagttgacattgccgcttcattttcatacaagctctttttcggatcaacttgtaataagtcaaagatttcttcgatcttgtctgggtaaccaatttttaaaaccaacgcctttaacttaatcacagctttctttttggtttcagcagaaagccatttattagcattaattctttcttcatataccttaagcatccgttggatcatgtcttcaacatcttttttggcttttgccccaaaatatttttgtccataaaagataccaactacttcatcaaaagcaccattagccaaacgataagcttgcttaatttgtgatggcaattgtggcgtaccagtaactgcttgaccaaaaggaaacgcagcttcacgaaaatcttgtgacaataatttagctacgctgttaatgtatttaactagcatccatcctttaatctcagcaaaattcccttcattcaataattcttcagcatgattgagaaaacgtggttccataacgataattcgatctggcttaaccggtaaaatagaatccatgaaatcagccatgtcaaatgatttaaattttttaataaagtcagcatatgttactggattataaattgcggcataatctgaccattcctcagttgacttaactaccttagctaatttttgatcaaaggccaaagcgctttcaacataaactcgtgcttcgcttttaccaataccggacattgtcagtaagttaatactttggtcttgaagagtatccaaaagttgcttagcatcagcagtttgatacgtcgtagtatctggtaagaatgtgcttgggccaccaaaatggagtacgtttacatcagtgttcttcatatcggcatcgacgtcaaatacaaacggtaaagcatatggtcccataaacaaatcggcagctttttgtttaaaatcattaaaattatttaaggatattaatttttgtaaatccttttgaataggattagctttttctgcatccctcttagcaaaatcttttgcaatcttatacaaaataactgccttatcaaagtctttaatctcaggcatcttttctttgcccgccgcaatgtccgcaaagtctttcattactcgatcttcgattttttggtcaagctctgaattgacaccagcagatgtcttatcagcaggaatttctgctttagatagccattctgagttaacagccaagtataagttatcttgtggcttagcatttaagtctggcttagaaacgtcgccagctccaccacgaactgtaaaatatcttttcatttttgctccttataaatattcataattatttaatactttttaactattatatcaaaaaaagacgttgctactacacaaacgtcctgaaaaacaattagtttttattttcattattttgcaaggtatacaaattatagtaataacccttttgtgcaagcaattgatcatgcgtaccccgttcaattatgcgtcccttgtctaaaacaataatttgatccgcatcggcaatcgtagaaagacggtgagcaatagctaatgtcgttcgaccctttctcagccgctttagtccttgctgaatcaaagtttcagtctcggtatcaacatttgctgttgcctcatctaaaaccaaaatcttaggatctgtgactaaagttcgagcgaaagaaattaactgtctttgtccctgactaaattcttctccgccttcaatcactttagcatgatacttacccggcattctttcaataaagcgatccgcttggactgccttagcggcgtctttaatctgattatcagtaatttgattattatacaaacgaatgttagatgaaatatctccataaaacataaacggttcttgcaataccaagccaagtttttttcttaattcttctttaggatatttacgaatattaacgtcatcaatcaagatttcaccttgaccgaattcgtaaaaacgcatcatcacgttaataatcgagctcttccctgacccagtatgaccaacaattcctaaagtttcacctggattaactacgaaagaaatatcatgtaaaatttcatgcttgccatcataagaaaagcttacatgtttaaactcaatttttcctttagtaatcgtcaatcctttttgagcatcctgctgtggttcatattgggtatcatcaagaatccgaaaaatccgctttcctgcaacaatcccatcttggaaaaaggtcatttgatccatcacagttgaaataggattaaaaagttgcgaaatgtattgtgaaaaggcatagactacaccagctggaacaaaagtttcacgtaatggaaaaccaaagtacattaatgaaatggctaaagctaacgaataaagcagcgatgtcaatggcgataataacaatgaatttactcggatcatgttgaagcgtgtattcattaaaccaccattttcgccttcaaaattattagtcatccgtttttcttgattaaattcttggataaccgatactccttcaattgattcatttaagttagcgttaattcgactaagacgctcacgataattacgataaagacgtgagcttttttgcgaataaagccaaacaactaataataaaatcggaataaagagtaaaatcaaccacccagcaactatattagtagtaaacatcgctactaacgcagtaatcaccgaaaaagcaccaatcacaaaagttgatagcaccgtcaaaaaattactcaaagtcatcgtatcattagtaactctagaaacaattgagcccgcaggagtttgatcaaaatagcgcatccctagcttatgcagtttgcggtacaatgcccttctgacactctctagcgttttttctgatcctaaagcaaagaaatattggtaagtaaactgaattattgcctttaaaattgagcctaaagcataaagaaaacctgcaaacaaaatcacctgcactgttgtgctttgatgcaatagaaagtgatctaagaaatattgcaagccacgtggcaaaagaatattaattacactaacaataaatgcaccaactaaagcaacaatcatttcaaatttaaattgcttaacaaagcccattaaacgcttaaaaatatcaacttgctctttaaatggtatcgccttagaccaaacagattcatgctgttcttcgttattattcatctgtatcttcacctactttcgcttgtaattcctgtctacgccacatttccgcataccatccatctgcagctaatagttgttgatgattaccacgttcaacgatttgaccatcctttagaaccaaaatcaaatcagcatccatcacggaagtcaaacggtgagccgcgatcattgtagttttatcagctctctcttttcttaatgatgacaaaatctcagtttcggtctttgcgtcaactgctgacaatgcatcatctaaaatcaaaatctgactatcttttagcaatgcccgagcaattgacattctctgtctttgaccaccagaaagagataagccattttcgccaactaaagtttcatagcctttaggcatttgcaaaacatcatcatgcaaatcactcttcttggctgcagctgcaatatcatccttatctacattttcagaagagaaagcaatatttttgccgatactagttgaaaacaagaaattattttgaggaacgtaggagatctgactgagtaatacctttagttgaatatttctaatatcttttccattcagagtaatttgaccatcatactgatcaaattctcgcaaaagcagttgaataattgtggttttacccgcaccaactcgaccaactaaccctaaagtttgcccaggttttaaagtgaaattgacttgctttaaaactggaatatctggctcatctggatatgcaaatgatttaatgtcatattttaattcaccttgcaaatcttgagaagtaatatttggatctgcatgtgcatcagtaatcaaaggcctttcatcaagtaacttttctacacggtcataacttgcactaccacgctctagaatattaaacaaataaccaatagcaaacattggccaaaccatgttagaaatatacgcgataaaagaaaccaactggccaattgataaaatcttgttagttactaatagtcccccataaataatcgtgatcacatacgtagtaccgataattattgttcccagtggatcaaataaggaatcccagacaaaaacttttttattaatattgatcgtttcatcgaccatcttgtcaaaagcagcagtatcttctttcccttgaccaaaagttttgagcaccttaatcccagatacagattcctgagttttattattcagcttagagaatgcagcctgtgacttatcaaaagcatcatgtaagtgatcacctaatttccaagctcccaatgccaaaaacggtaatggtaataaagctacaatagttaaacgccaatcaacaaaaatgatcatggcaatcattgttgaaagtcccataactaaagaatcaaccaatgttaaaacgccatcaccagcaacgttctgaatggcagaaacgtcattagtagcatgagccattaaatctccggttcgatgacgctgataaaaagtccgatccatcaccataaaatgatcaaataactttgaacgcatttggcgctctaattctgctgcgccgccccaaatttgtttacgccaaaaatagcgcaaaatataaagtgtgaatgcagcggccacgacagcaatgatcaacattccatattgtccccaagagatgtgaccttgatccaattgatcggccattaagcctaatacacggggcggtaccaagttagctaaagaagttaacgccaaaaaggtaatgcctatgatataacgttttttctcagccttaaaaaaccaccctaacttactaaatattcccatatttcacctcattcttaaaagtgcacaaaaaagacgaaggaaatccttcgccttttctaacaaaactaattaaattaattacttttgttggtgcttcatcatgttcattacttgatgtaccttcttatttgaaggcttttgacccatttgggacatcatagcaacgatcatatcttcactaataggaggattttccttaaagtacttcttcatgtaagctcttgcaccgtaaaaacctgctacagcgccaatcaagagcgcaatgataattaaaaaaattgctaaacctaaattcatattaaatcctccatctaactaacatttatatcttatcatagttctctaactttttgaaagaactaattaatcttttctaagtccttttcttctttgtgctcgcttggcacgttctgaggtaacttccttgccattcttgtctaagatgaccatgttttcaacatcttgcttaaaggcagctctaaagttagctaaaaatttcttatgtagttcttttctttcagcttcttcctctggagttaagccttccttttctttcttatggtaaagttcgttgattcgatcagttacctttttttcttcttctttgctcattgcatctttattatccataataattccacctcacattaacactcattagtctaccctattttatgtcataaaaaaagtataacttcttaagaacgcctgtttgataatattgacattatctggtagaattaggttataatattaagtaccataaatacaaacggagaattaaaaatgccaagaaaaacaagcgataaaaagcaactagaaattttgcaatatatttacgatacagttgagaaacggagcattccacctacagttagagaaatctgttctgcagttggtctttcttctacttccactgtccatggtcatttagctcgccttgaaagaaagggctggctagtaaaagacgctacaaaacctcgtgctttggaaattacccgtgaaggtaaaaaagagttaggtatcaagccaaaggaaattccagttatcggtgtggttactgcaggacaaccaattctggcagttgaagatattgatgactactttccactcccaccagacttaaaaagtgatgctggtgaactctttatgctcaaagtccacggtgaaagtatgattaacgctggcattttaaacggtgatagcgtaatcgtacgcaaacaatcatctgccaacaatggtgaaatcgtggtggcaatgactgaagaaaatgaagctacagttaagcgtttctacaaagaaaaggatcactaccgattacagccagaaaatgatacaatggctccaatcattttacctaaagttacaattttgggtaaggtagttagcttgtatcgtaataacattgactaatttcaattttgacctagataatttatctaggtctttctttatgccaaaatttcagttattttttcttcaaataatggtaatcatttctttagataacccgcacgagttggatgaatttcatcagccatatacaaagcgtcttgatgctgaaaatcaggatgatcgtataaatctagaatctcaacgtgacacttttgagccagttcgtgtactcgttcaaccatctgtttgtataacggattagcaaaataaggattagtataaattaaaattggacatttccaccttgcttgagccgttgaaatcatatattccaaagctcccgtaatggttttggtgtcaaagttttgattagtaattttgcctagttttttattttgatttgcatcattagttgaaagttgtaagacaaaaacatcaggttgtgattcggtcagctcttctctaaaacgagcaacataagaatcgtttggcttataagtatcttcatcaactaaggtcgtaccattttctgcatctttaattgcagcaacgccatcacgcttccaaagataatcaacaaagctttcacccaaagcgccaaaaccaaaagtaacagaagaacccaaaaataaaattttcttacctatcaaaggactcgcaacggtttgtacactatttagactatacttacgactatttcctgctaaataagcaatatcagtgtaataacgttgatgtaaagcatgctcatctagatccatgcgtaattcatttaaagcgatatccgataaatcattattttgtctaattggaatcaaaaaagtttcattactcattttcagatttttccttttctacatacggcttgattttatcccaatctttaataatatcatctgttagcttgcgattataaaaaacagcggcaggatgatattctgggaaaatagtgtatctttcttttgaccaaatatagccgtctttagtttcatttaaacgtaaaattggtgtatttttaattacttgaccatgttcagctgaaatcttatgaccagaccccaaaagacgttctaatcccgtattacccaaggcaacaattagttttggttgagcatagtcaatttcaaaatctaagaaatgcgcatgagctagaatctcttttttggttggcttacgattgggatatttgattacttctttattttcacgcttgctaaaaacctttttgattgcaaaaggtcgacttctcacagcagatgtaatatatacctgatcacgtgtcagaccaatctgcttcaatgatttatccaattccttacccgcatccccgctaaagggaatattattaacaatttcatttcgaccaggagcttcaccgacaatcattaataaaggatgttggggacccgagccagaattaattccttctagctgcatgcctttagatcgttctttcacttcgtcaatcagttttttcggataatccatttttccatcttcttttaaatttttgttttactcgactttactggggacatttacaaatgtggataactattatttctaacgctaattccacatttaatattattttttacaaaaatagcttcacaataacaaatgcctttatatcaagattagtaatagatatctgccagctttgtgatttttgtcttagtttcacaaccgtttcacggttgaatttcttcacaatcttttttcatcattactactatacagccattttatcattgtgatctttttaaaataaaaggctatcaccttctattaagataatagtcctttatgatatcagtttaaaagtattacacacagactaattatgcaacagtgtctgcaatattaaattagttgaaccgtgacgataatctaatggtgatgcgccatagtctttttcattacccaaataaagatagtttttggtacctttaacatgtaaataaagttgaggtgatttttcaccttctattttggttctatcaaccgttagtttagcgccagcacgataaagcacctttttattttgcttaaatttggcagtatacgcatatgcatcatttattaaagaaacactcacaggtcctttatcccacaacgtcttaccatctactaaagcaacgtctgccgcattgatatattgtgttttactaatctgaaaataagtatgatcaccttgttgaattgcaggtaaagtcatcttagttttattttgataataataaaattgagtattagcagccgctttcttaggtttaccataatagtttaaaaccgtgccttgctttagatttttattcttgaattgcttgcctgttgcatcataaataggtgcattattatttaaaaacacggttcccttgccattcaaagtagttacttggctggcatcaatataaccgcccttaccaatattaaataattgcttaggcgaattatagtatggtacctcaatttttggtttttgtttattagtaaaataattcttgccaccattatagctaactaattttttaccatttttatcataaatataatttttcttgtgccgaaaatgtaacttgaccgtatttgtgttaccaagccaggttaacacatcgctttctttaacatagcctcctttaccaatcgaatagtaaagcttaccaccaataattcgactagttggcacaggaatcccagctgcaaagcgctgctgaataatataagtcttgccactatattttaaatgagtaccagctttgatattttgatgatatttcgaattataattacctgcacgatcataaattattggtgctttatttacctggattgtattcttagctgcttgggctttcttcgtcgttgcttgtaccgtagtcgtgatattgggaaaagataatataggtgctactgtcaatacggttgctgccacaagtgcaaatttgcaattgaacttcatttatttcacctcattcattccataactccatcatagcattttatatacaacttttgggtagaaaaaaagccagttccactggaactgaccttttttatgattgacgttatgattaacgacgtgcttcagcaattcttgctgacttgccgtgacgttcacgtaagtagtaaagcttagcacgacgtacacgaccatgacgcttaacttcaaccttagcaacacgtgggtcgttaactgggaaggttctttcaacaccaacacctgaagcaatcttacgaactgtgtaagtagcaccgatgccagtacccttcttcttgattacaacgccttcgaacaactgaatacgttcgtgagtaccttcaacaacacgtacatgaacagtaacagtgtcacctgcacggaatgcaggaatatcgtcacgaagttgttctttagttaattcttgaattaatggatccataatatacttttctccttcttcggcattcatcaacgtaccaacgccagcggaacacccctaaacttattcattgtggtcacgccacgatgaatagtatatcaagtagagcttgcttaatcaagctctgctttaatatctgccaacattttcttttcttcagttgttaaaactcgttctttgagcaaatcaggtcgatgcaaatatgttgttctaagagcctctttatgccgccattgtgcaattttttgatgattgccactagtcaatatctctggcaccttttgcccttcaaaatctgctggacgcgtatattgcggatattctaacaacccatgtgaaaagctttcttcaactggactagctgcattgcccaaaataccaggtaaaagtcttactgtagcatcaatcatactcattgttggcaattcaccaccagttaaaacataatcaccgattgaaacagtttcgtcagccaagtcataaacccgctgatcaaagccctcgtaatgtccgcaaataaaggttaattcatcttctttggcccagctttgcgctattttttcattaaaagttttaccttgtggtgcagtaataattaccttacctgtggatggtaacgagtcaagtgcttttttaatcggcataatttgcaaaaccatcccagcgccaccaccatagggcgtatcatcaacatgatgatgtacatcggtagtgaaattacgaaaattaactaaattaagctcccattttttatcttcaagcccacgtcccaacattgaaacttgcaaaggagcaaacatatcaggaaaaagtgtcaatacattaatcttcatcgcgtaagccctccaataactcaacatagacttttttattagctacatctacttttttaaccaccgatgcaatattaggaatccaatactctttaccattatcttcatggactagccaaatatcattagcaccaggcgattcaatatcagtgattttacccaagcgcttaccggattcttcatcaatgacatcacagtcaaagatgtccttataataataaacgccttcaggtagttcaccgcggtcggcttcactaacaactagtatttttccttttaatttttcagcttgatcaatatcagtaatctctgcaaattgaactaaccaaaattgcttaaaaggtctactcttggccacagttaaaacttgagaagtttcacctttgattgccaaatgcatccctatagcaaaacgatcttcagggaaatcagtaattatactaactttaacttcaccattcaaaccgtgcgtagttaaaatccgagcaacatcgtaatattccattttttctcctttaggtataaaaaaagcttgaagcacacggcatcaagctcttaattaatagcaaaattacttattgtattttgcatcgtgcaacttagccatcaagccagcacctgaaagaagtgatctaacagtgtctgaaggttgtgcacctttttgtaaccattcaaagatcttgtcttcgtcaagcttcaattcctttggttgtgaaactgggttgtagtaaccaacttgttcgatgaagcgaccatcacgtggcatacgtgagtctgcaacaacgattctgtaaaatggctttctcttggcaccagcacggtgcatacgaattttaactgacataaattaatttcctcctaaaacttaacgattaataatataccaccaaacttaacaggtgtaaagtatttttccttaacagtttattttttaagaatggaatctttttaccttgcgtaaacgcttcttcttatttttcttgaaattcttgttcattcggcgcattgccatcttagccattggcgaatccattccaggcaaattgctcaagcccttcatatttcctttagacattttactcatcatgtcgcgcatttgcttaaactgcttaatcatcctattgacttcaactacaggacgacctgaaccagcagctattcttcggcgacggcttggattaagcatatcaggattttctcgttcctcaggagtcattgaataaacaattgcttcagtatgatcaatttgcttttgatcaacatttagattctttaattgcggattattagatagtcccggaatcatcttcatgatttggtcaagaggccccattttttgaacttgttgcaattgatcaacaaaatcattgaagtcaaaagtattttcccgcatcttttcagcgactttttcagcttccttagcatcataatcttgttgggctttttcaattaaggaaagcatgtcacccatacctaaaattctggatgccattctatctggatggaaaacatctaaatcgcttaatttttcaccttgaccagtaaataagatcggcttaccagttaccgcacgaattgaaagagctgcaccaccacgagtatcaccatctaacttagtcaaaatcacgcccgtaacatcaaggcgttcgtcaaagcctttggctacatctgttgccgcctgaccagtcatggcatcaacgactaaaagaatgttatcaggatgggttactttctttacccgctctaattcttccattaaaggttcatcgatttctaaacgaccagctgtatcgatcaaaacatagtcattcttgttcttttcagcctctgcaagtccatcttgaacaattttagctacgtctttttctccgtcttcactatatactggaacttttaactgatcaccaatttgtttcaattgatcaacagcagccggacgataaatatcgccagctatcaacagcggacgggccttttcggtcttttgcaaatgataggctaatttacccacagtcgtagtcttaccagttccctgcaaaccaaccatcataatgatagttggaatatgcttagacttgtttaaaggaactgcttcttcacccatcatcttcgttaactgttcattaacgatcttaattacttgttgacctgggtttaaactttcctgaacttccttgccaagggcttctttcttaatggttttaataaagtccttaacgaccttaaagttaacgtcggcttctaacaaagcaagtcgaatttcacgactagccttattaatatcttcttctgagaccttacctttgccagttaaattttttaatgctttttgaattctttcacttaaattttcaaaagccatgggctattctcccctcaattgatttaataaattggttatttcttttttagcagcttcactatcaccattatctaaagataaaagcgtatctgccaagacatcttcaacctgattgttgtcgcgcttcatatgcaatttctcttcatagttctgaagaattttacttgagcgcttgagattatcatagacagcctgacgagatacttgatgattagcagctatttcgcctagagacaaatcattgtagtaatagtcttcaaaataagattgttgcccctgggttaataaagagccatagtaggcatataaatcgcctagctcctcgtttttagttagttcatccattgattttcaccagtctttagtataacaaaggtcataagctagtgctagattaacctatcttagataacaatttctaaaaaaagtggaatttcaaatatgtaatagttgattttttaacgtacttttaattataattagatgaatatattttaacataaggaggaagttgcgttgtgaatctttggcagagaatgaacagtaaagaagatccacgcgtctatgaaaataaagatggacacctggtgcgctcattaaaagtaaaggacttcttagctctaggtgttggaacaatcgtctccgcttcaattttcactctacctggtgaagttgcagctaagcataccggccctgcagtagcgatttcctttattttagcagcaatcgctgctggtttagtggcttttgcctatgcagaaatggctgctgcaatgccatttgcaggatcagcttattcatggatcaacgtagttttaggagaattctggggttgggtagcaggatgggcccttctagcagaatatttcattgctttggctttcgtcggttcggggctttctgctaactttagagctctaatcgcaccattaggttggaaactacccgcgtcattatctaacgcctttggcaataacggtggtattattgatatcatttctttagtttcaatcttgttagttgccttattaattggtcatggtgtttcaagggcagctcgcgttgaaaatgccttagttgtattaaaggtgttagccattctactctttattgccgttggcgtttttgcaattaaaaaagttaacttcaccccatttataccgaaatacaagatgactgctaacggtccattcggtggctggcaaggaatctatgctggtgtttcaatgattttcttatcttacattggctttgattcaatcgccgctaactcagctgaggcaattaatccacaaaaaactatgcctcgcagcattttaggctcacttgctattgctgttactttatttgtcggagttagtttagttttaattggaattatgccttatcagaagtatgctaattccgctgaaccagtgggtttagccttacggtttgctggtcatccaattgttgccatcattgtccaaaccattgctgttttagggatgttcactgctttgattgggatgagtatggccggttcaagattgatctattcatttggccgtgacgagatgcttcctaaatggctgggcaagttgaatgcagatcgtcgacctaataatgctttatggacattaacaatcgtagcaattttacttggagcatttttccccttctccatgttgtcacaattggtttcagctggtactttaattgcttttatgtttgtttctttaggtatttataagttgcgtccacgtgaaggaaaagacattgatgatccttcattcaagatgccattttatccagttttacctgctttaggtttcatggctgctttaattgtcttcttagggcttgactaccaagctaaattttatgctggtatttggtttattttaggcttaatcatttactttagctatggtgttcgtcattcaattttaaataagcaaaataaataaaattaatctaaatacagttaaaaagatctgcattttgcagatcttttttcgtaccattattttttcaatacaattccttcatagagttttactgtaattaagtaataaagcaaatacaatactaaaaagatcgtaaatggaatccaaattttatcgtatggattagctaaaatccctttgaaaaattgtagtccaaataatacatcaatcacacccaagacagccggtaaagcgaacaaggtaccaatctccgctttaatcgagctctttaataacttacgtcttgatccgaccttccacaacatttcatatcgaggacgatcactgtttgctcctgatagcactttaaacattaaggttgaagctaacatagctaagaaagctaagcctaagaagaagcccataaattcaaaacctgacgcaacgcttgctactaagcgatattgagcagatttagaattattcagagaaacataaactccttgtgcatccttagtaactgtctggtcaagtgacatcttttgcaatttttcaatattcccggatttaaaattgaagtgcaacactaagtgttaaacaaaaaggccatgaagacctaaacttgaagtgacgaaaaatcaagaaaggaagatctttatgaccaattcaaattctagcatttctaagcactatcatcaattaaccagcgtacaacgtggacaaattcaagcaatgctggattccggcataacttcccgtactgttatcgctcaagaagtcggctgccataagtcgacaatcagtcgcgaaatcaaacgcggaagtgtcctgcaaagagacagcagctatttattgtatgagcactattacgctgatactgcacagatttattatgagaagcgtcgcaaaaactgctatcagcgcaatccattgaagcattatgctgtctttttgagaatgctctccagacgctttaaagctaaatttgatgccaccagcatcgatgaattcgttggtgaattcaaaaggactatgccaggctacccttgtcccagcacaccaactgtctatcgctatattgatcagggcttgctggacataagcaatattgatctgcctatgaagctcaaaagacgcaggaacaagcgtcatcacggccatagcggtcatgctttgcacaagaagcatcttggcaattccattgaacagcgtcctaaagagattgaagacagaaaaacgccgctgcactgggaaggagatctggttaaaggcgtcagacgcaagaatcagcctgctttaatgactttgaccgaaagaaccacacgctttgaagtagttatcaagattcctgactatcgggcaagcacatgccaaaggctgcttcaaaatgagattgacagacatcctgcctggtttaaatcgatcacgtttgacaatggctctgagtttgcggatatgaccgagatcaaaggctgccagatctacttcgcccacccatattctccatgggaaagaggcaccaatgagaactgcaatggacttctgcgtcaattcttccctaaaggcaaaagcatgaaagataagtcagctgcttattttcaacaggcaactgatgccattaaccgcaaacatcgtcgaatccttcaatatcacacagcagaggaactcttcaagcaatatatctcttcataacctaactgttgcacttaatttgacaattcaggatttttcaatattattaaaattacttctaaagttattgattaatagcaaggttacttgtttgttttttccaggaatcttcacatattcagctggagttacaactttaacctcataatcagaataaggtgttaaactagcaagttggaaattcatctcttgttttttattctttacacctgcaactgtaatcgtctttgtcttccaattcatttggtcgccgttctttcgaccagattggaatttgatttttttcttagcaatttcttggtcagtaacatatagaacaggaaacttctttttcccattgaccttataattcaaagtcgtttgttttctaacggcaacttttttaagttgttgattaactttagcatcccttttatacaacacagcatcataatatgttgcctgaagagcagtctctgtcatattattaaagtttaatccaacagtgatcgcacctaatgctagagcaaaaagcaaggaaataacagttaaaactctattgtaatcacctaacctaaattttagctgacctaaggtaaaagaatgcagtttactgtatttaaactttttatttttccgtaaagcattgataactgtagtaaatacagaatcaaatacaaaatatgaaccagccaaaatagtgacaaaaccaatttcaaccgatttaatttgcaactgatggtaatcccacattgcccagtagccaatggctagaagggcaaggcctagaattacttcagttgctttccagattcggttattacgtaacttaactggtttttgatcctcatgcaaaagcttgattacactagtacttaccaatttgtgccgattccaaattgcagccaagaaaaataaaactacaaagaaaacaactgtccataaaatagccggtaaataaaagcctaagaatttatgcagctgcaaacccagttgagagattaataactgagaaacaacttgagtcaagccgataccaattaaaattcctaatgcagtagcgagtaaaccaataacaaccgtctctgtaaaaattaaacggccaattttactatttctcgctcctaggatcatataagtaccataatcttttttacgcatactaagcaaaaaactatttgcgtaaacaatatagactagggtaataatagctaatagcgctatcccaaaaataaagaccatctgggtaattgaaaaggcaatggccattgaacccttaagaaaagctggattaattgcaatggtcataaacatataaaagattgcagcagctagagttagccccgaaaacaaaacagcataatctttaaagcgactttttagccctgttagtgataatttccaaagcacgtctatacctccctctaacgtctacctaattcagcaataatatcttgataaaattcttctctggtcttattttcttttttaatttctttgccgatttttccatctttgatgaacaaaattctttgagcgtaagaagctgaataaggatcatgcgttaccatcagaatcgaaacttgatcattcttattcaagtctgccattgttttcaataattccgtagctgattgtgaatctaaagctcctgtaggttcatcaccatataaaattgccggattatggaccaatgctcgagctgaagcaacacgctgtttttgaccaccagaaatttcagctgggtatttgtccaagatagattctattcccaatcttttggcaatcgccattgcttttccgtcaatatcctttgccttcactccttgaagcgataatggcaaggctatattctcgcgattagtcaaattatctagcaagttgaaatcttgaaaaataaagccaatttcttttccgcgaaaatctgccatttgattgttcttaagtgcagtaatgtcttgcttattgactaaaacatgtccactagttggcttatctaacgtcgacaagatattcaataaagttgtctttcctgaaccagaagcacccataatgccaacgaattcaccttgttcaatggcaaagctaattccttttaaagcttggtattgcttctcaccttttttaccataagtcttagttacttgatccactcttaaaatttctgacatttttatcctttcactaataatattactgttctatttacttaatacagtaatattatattaaagatttgtcaataatttttgcataaaaaaagtgtctgggaaaaaactagcttccagatgaataaaaacgatcaagatttccttttttaagaatcttgatcgtttttttgttctctttaaaatttttaacaataaaaatcggcccttcagccaccttctttgacaatatttgttcaaattcatcatcataaaggcaattccgatatcggtttcgaccttctctttacctcgcaggtgcgttctgcgcatgccaaatacgttcttcaaatgtccgaaaactggctctacatcatattttctcatgccatagatgtgtctgccttcttcgctttggagaacttcttttgctttttcttttaaatattgccagttaggattatagcgaacttggcgctggcggccgctagctgttttagccaattgttccaattctggcgttagctggaactcgtctgcctcataaaccttaaaatcacggacctgaccagtagaacgatccttgcgctggctgtaatatttgaaattgaatctgacgccatgatgatcaatgtaataatcatctttttcattgtagtaccagttgattagcttagttggatcattcttatactttttggtctgttctttttcatacatagtgtagggaataaagtacttcttgtctggatatttttcctccagcatcgaataattgtattcactgccatagccagcatcggcgacgattttgtcaaacttgtccaacacggtcatttgatccaaaaccggctccaaagttttgaaatctgtcggattaggaaagatggcataatcaactacatattgatcggtcgtgactgcttgaatattgtagccaggctttaattgaccatttttcatgtggtcttccttcatatgcataaaggtggcgtcatgatctgttttggaataactgttgcgtccggcaaagatctcttcggcttcttcatatttttgcattcttggcacataatcttttcttagccggtgcagaatcttttttagtccacgtcgcttggcttttcgaggtgaaccgccaggaatggctttgttttcctgctcaatctctttagtcagcttgttaatttctgcttcagtttcttgagctaattcctttagcccctgactagtttgaactttttctttttccatttctttgactacttctttagtaatcaattcatcataaagttcaactgcctggcctttcagcttttcatgatacttttcaaccgctttgcgccagacaaatgtatagcggttagcatcagcttcaatcttagtaccatcgataaaagcagcaccttcattgattaagccttcatcttctaacaggttagtgaagtagataaagctctttttaatcagttcattggcatggctgcttgatctaaaattattgatagtatgatatgaaatcttttgctggtcagccaagatcatcattggcagattttcttccagcatcaactcaatctttctgccagaaaaaactcttctggagtaagcaaaaagcagtattttgagcatcatggctggatgataggctgggcggcccgttttagcagtcttgcctactaaaacatcttctggaattgaatctacaaaccagctgatgacattagccaaatgattggccggaatggcaaaatctagattaagtgttaaagcagtttgacctgtgatataattcttgtacatgttagtttccacctttttgtttttattttgtgatgatttaataatatcaaggctggagctaaaagtatacaaaaagagcgttgaaacaaaaattcaacgttcttttttcatgatctgagacttagttttttcccagacacttctactattttacattacttattgtcttcactcgacttaagcatctttttcagtacattaaccaagccaagagtttcatctttactgagcatccctgtaatagtttggtcagtttctgcacggtgcttttcaaatttcttgcacaaatctttggcagccaatttttttgtcaaagatttgaccttgtcattagttacatgcaattctttagccaacttttcaaaagttttgccatgctgatgatgatttaattcaataagcatttccaattcattagcattaataccaaattttttaaatcgttattcatttgtttttcaacttcattgttaatcttagtaaaaaatgagccaatagtaccttctgccattgtctatattcctttcatttcacatattataaaaaacagccctttttcgagctgttttgaatttattaaagattttcatccatattgaaagtaagtttggacatgttgatcgattcaatcatcatttgaccccaaagcttttcagtttccttacgagtatgggcaacagtcttttgattttccttagtcaaatattcagttaattcatcacctgatttaccttctgcaccagcaataatttcttcaactcgacctctgaagtagcggttaagttcagttaaataagtagtatcaagctgaacaaattgtgggtaatgactttcaacgatagctgcaaatgacttgtaataccaccatgcatcattcatattgtaatccattgaggtattgttatatgaaggatcagtatcattcatattagcaaagaatggtacaaatggagtgaaagttggaccaccgatacataaccacataatagccgcacgatctgctggaacatcacttctaatttgcaaaatatgagcattttgcgtacggttcaaaccgattggacggtagcgatgtttttcttcatccgtacccttaccaaatggatcatacggggtatcttggtagtgtgaacctaaagcaaattgaatatcttccttagtgatcttcttagctgccttacgaataaatggaatatcgccatcttgtgggttttgttcaatttcgggattgaacaatttttgaatataccattgacggttggtgttgtagtgacgatcttgttcagtataggtaccaaaaatatgacggaagttccagccttcatgatctgggttcaaatggtgttcttcaacaaattcttgaatacctttactccacatgaagtaatcaggattatcaaagtcaacttgttcaatcgcaactcgattaccagttgcagcgtaacaatcatctggaatgcgctcggctacccagtggtgacctgtaacaatttccatgtaccaaatttcatctttatcactgaataaaactgagttaccagctggtgaaccgtacttagcaattaacttacctaaatattgtacaccatcacgagctgaatgaatgtatggcaaaacagaagtctgcatgcagtcttcatctaatccatctttaacaagtggatcaaatgctaaagttctctcattaccataagttgattcagtacatgacattgcaacgttttcttggttaattccactttcatcgtagtagccacgatgcttgtagtcaacattaggaacagctggtacacgttgcgcatcttctggcaagtccatttcaaacttgtttaaccatgacttaatatgtttcttttcaccatgacgggctggctcaataatgaacttttgtggggtaattggacgaaaagtgtcatcattacgagcaatcatagtggtgccatcaatcgaggcatttttaccaactaagatagtagtacaagcactatattctttcataaaattctccttataaaacaatatttacatctctaactttatcactagaccaagccgtggaaaagaccgatcgcataatttgcagcatcaaaatcagctaagtcttcagctctttcgcctaagccaaccaatttaaccggcaaattcatttcgttacggatagctagaactacaccacccttagatgagccgtccaacttagttaaaacaagcccagttaattcggtggtcttgtcaaagtctttggcttgcaaaagcgcattttgcccggttgaaccatctaacacaagcaaggtttctgttggctgatctggtaaaagcttcttgattgttctttgaattttttccaattcagccattaaattcttcttattttgtaagcgtcccgcagtatcgactaaaagatagtcagctttttccctgattgcccgttcagttgcatcataaacaacagaagcaggatcagccttttctttaccagtaactacgggtacgtcaacacgttttccccattcaactagctgttcaacggcacccgctctaaaggtatcggccgcagctaaaattactgactttccttcatccttaaaacgtttggctaacttaccgattgtagtagttttacctgcaccattaacaccaacaagtaggtaaacgttaggtttagcttcagcattatacgtcaattgctcatcttcgctattgccacctttatcgtaaaggtcaaccaacttttcaacgattactcgcttcaagtcatcacgtgacttagcattttgcaatttagcctcttcacgcaattcattagttaattgttcagcagtttcatagccaacgtcagattcaattaataagtcttctagatcatcgaagaaatcttcatcaactgttctaaacttggcaaaaaaggcgttaagtcttgcaccaaatcccttgttagtcttttctagccccttttcataaagctgttcttgtgattctgttggctcctcatcagaaacttcagtttcttcaacttgttcttctgtttcagtctcagtagtctcttctactttaacttcttcaggctgttgtttagaatctaaatctactgctttttcttcatcaccagattcagcttctacctcagagtcttcttgtgcttctactgtttgttcttcttcatcagtagtttcagttttcgatttagcttcatcaactactttttcagattcttgatcattatcttctgattcagtcttagcttcattttcttgctcagtctgtttttcttcttttttgttttcatcctcttcgtcttttttaccaaagagtgatttttttattcgatcaaataaacccaactatttcacctcatttttattcttcatttcttttaatgaaaccgacaatacttgcgaaacgccagattcttgcataaccacaccatatagttggtcagcctgccgcatcgtccctcgtctatgcgtgatcacgatgaattgggttttcatatcgtatttaagcaaaaattgcgcaaaacgagtaacgtttgcatcatccagggcagcttctacttcatcaagtacacaaaatggtaccggattaacctgcaacatggcaaacaacaaagtaattgcggttaacgcgcgttcaccaccagaaagcagacttaaacgttgctgctttttgccaggcggctgtgcgataatctcaattccagtttctagcaaattattaggctcagtgagttccaatctagctttaccgccaccaaagacaactggaaaaatactcttaaagctagatgctacttgattaaaggtactcttgaagcgcgtcttaacttcttcatctaactcgttcattgacttttcaaggtcatcacgagcttttaacaggtcattttgctgaccattcaaaaagtcatagcgctttttcacatcttcatattcttgaatagaatcaagatttacttggccaatatcttcaattgacatgtgatgcaacttcacgcttttagccagttcattgcgcttttcttcagtattttcgccttctgcttgctctaaagcagcttcaaacgttaaggcatactcttcactcaaagttgacaagcgctgatcaattgcggaattaaacttcgcaatctttactgagtaatcttcttgttcaattgctgcatctttgcgtaaatcataattacgactggcaacttggtcaagttgattaatctgcgcatcaacttgtcctaattgcgcactaagttcattcagcttcttttgcagagtttcattcttttgcttaatttcagctttttgtgtttgtaaatcagaattctttttaactgataattcaccattttgacttaattcagttaatttctgctctaagctatcagtttgcttctgattattagtgatctgaatatttttttctttttcctgactagctaagttttccaacttattagtataaactgcaatttgaggatcaagctttgataattcctcttgtacacgttgacttaagctattgaagttcttaatcttttcttgcaagtcattcattttgcccttttgtacttcattttgcttagccaattgttcctgctgatcattagcctgagtgatttctttctttaaagcagcaatccgatcttgttgttcttttactcgagatttatataaactattagcatcagttagccgctttacttccttttcttgattttggaaagaaatagcagcttcattaatcgcttgattagtctcctgcaaagtatcacgcagttgttgcaatttagccgcaactttttcaccttgagtaactagctcatctaaccgttcttgatcttcagccaaattttgtcgtaaagtctgtaattgcttctctaactgattaatttcagttgccgtctgcagtggtgaattattacgttggtttctttgaccaccagtcatcgaaccacctggggaaatcacatcgccatctaaggtaacaatccgatagcggttaactcgacgtgaaattgacattgcactatcaatcgtatcaacgataatcacactacccagcaaataattaatcgcagcagtaatatcttgatcggctttactttcaactaaatcacttgctacgcccttaaagccactaaaagattgcaaagtagtgatagttgactgtggaatagtatattgacgcaagccatctaatggtaaaaaagtagctcgtccactacgactacgctttaattgattaattgcatccctagcactaactctgctttcagtaatcaaatcctgtacgccaccgccaagagctgtcgtcattgcagcttctagctcaactggaaatgtaatcaattcacccacagccccgatcacaccagggaaatcagatagatgattcaaaacattacgtacaccgtagtaataaccctcatgccgcttttgaatatttactaaagcttcatgtcgcgcttcaactttctctaatttactgcgctctgcgttaacggcttgccgaatctgattaatctgtttagttaaatcattattttgatcattaacttgcgcaaatttttctttttccttttgccgcttaactgtcagctgcttgccttcagttctcagcttttccagttcagtccgagcatcggttagctgcttgcttacatcactattttgataagtagtgtctgcctgactacgttttaattcagtattcagattaacaatctgattattagttgtagcctgatcttgtaaaagttgaatatagtcgttacgacaatcttctagtcgcttactcaattcttctggatcatcgtgcaatttaccagtcaattgatcatgctgctcttgtaaagcatcttgctcctgcttaagttgctttttattccgctgcagttcagacaattcatcctttagcttaaccaagctatttttcaattcttcaacttgacgttgagtttctaccctagttgaattattaaactgttgtgattgctgtgcgacctgcaagttagtattgatctgtgataattggtcacttagctttaataattcactctgcgtttgctctcgctcattttgaattttttgatattctgcccgtttttcagaaacagcactttgcgaaccttttacttcattatccagttttgttaacaggatttggttcctatctgctgctttttggacttcttctttttgccggtttaaatcctcaatttcaaaagctaatagactttttaatttctgatctagtcccttcttttgaaattgatattctttagccagcgaactttgctcatgcagcggctccaatcgaccttcaagttctttaaccaagtcattgattctaattaaattatccttggttttctccatttgcgccttggcagcttctttttgttgtttaaaatgcaaaacaccagcagcttcttcaaagattactcttctttgttcaggacgagaatttaagatctgatcaactcgaccctgagaaataattgctaggctattaggtgaaattccagaatcaagaaagagtgtccgcacatctcgcatccgcacttgctgattattaattaaaaattcactgtcacctgatcgcagaaatcttctagtaattgagacctgatctgaatcaaaagccaactcacgctctttattatcaaaaactaaagtaacttccgccttattgagcggcttgcgaaattgactaccggcaaagatgacatccttcatattcgttccacgtagtgacttagcactggattcacccattacccaacgtacggcttcagtaatgttacttttccccgaaccattaggaccaacgattccagtaattccatcatcaaaatgaatagttgtcttatcagcgaatgatttaaaaccatcgagcactaattctgttaatggcactttttcatccccttatttttctaatttttgtaaagcgaccttagcagcttgttgttcagctgctttcttattgtgaccctcaccttttgattcaacttttccgttaatttttagttcaacaacaaagtgtgaaggtaattgagattcactaataacggtgtattcgatattcacaggaccatcttgctgcaatacttcctgcaagtctgtcttatagtcgcgtgaatcatcgaattcacccttatcaatcaatggataaactgttaaatgcaaaaaatgttcaactgctggcatcccttgatcaaggaaaagtgccccattgaaagcttcaaacacgtcttccagtaaagttttgcggtgtcgtgctccagctttttcttcaccattgcccaagtgaatctcatcttgaaaaccacattcaatggcgaattctgaaaatccttcagttcggacaatattagatctcaaacgagttaattcaccttcattcaacttaggataatgaagataaacataattcgaaacggctaattctagcacagcatcaccaagaaattcgagtttttcataatcgcgaattccatcattgggatgttcatttgaatatgaagaatgcgtaaatgcttcttctaatagcttttcattgttaaattcgatattataatcgtcttttaatttttttaaaaactttgtacttaccataaaaatgcccctttttatacctataaattataccagttttcgggtcacagaaaaaagactgcttctaaaatttagaaacagtcttttgtaattttaaataattgctttacttagcgtaagcaacattgtaccagttagggaaaccattacccattgaatccgatggcttaagtgagtaaccagtaagcttcttgttaacggcagtaattgagtaactattagctataggaattacgtaagcttcatcaaacatgtacttttgccattcttggaatttttcaactctgtacttgtggttgaaggccttctgtgaatccatttcgtcaagtaacttggtgttttcaggagttacgaaacgtgagtagttcattggagccttttcgctatacaagtcattaggtgatggttcacttgataatgaccatgcaccaataaacatatctactgatggatcatcgttttgaaccttgtcgtagaatgaattgaattcgattaaacgaccactagttaacttaacgttcaagcccatcttcttccattgttggatgtagttttgaacgattggttctgctgttgaactaccagtcatagcagctaaacgaatagttaaaggcttgccattaggttgtacacggtaagtacccttcttcttgtagccagccttgtccaagatttcgttacccttcttgatattgtaagtgtaacccttgatgttcttgtcgaagtaatcaccgaattgcttaggaattaaagttggaattctgaatgataaaccgaatgagtagcgcttgtaaacttggttaacattcataccataaccaatagcttgacgtaaggccttgttattcatcttagaattcttgtccattacgttttcgcccttcttggcatcccacttaccaaccttaaagcctaagtatgagtattgtagtggaattttagcgataaagttaacgcccttagtatccttgatgttcttccattgtgagttgattacttgagtaacgtcaaattttctggacttaatactttgagcaactgagttagggttaattactgtagcagtaatctttgaaagctttggcttacccttgtagtagtattcgttaggaacccaagttactgattgaccacgaacaaccttttgcaacttgtaagcaccaaagaacaatggcttcttacggatcttatcacttgacattaagtccttgaatttaacatctttcaagtagtggtaaggagcagcagcttcccaaatgtaaccattacctgaagtgttcataccaggtttcatcgtcttaaagtgaagaactgctttacggccgttttcaccatctggcatttcaaagcctgagatagtctttgacttaccttcatggtattcttgtaagccttccaaatcagctaaacttgaagtgtaacgttgtgacttagtgtctttgttagcaataatttcataagcgtattcatagtccttggcagtaacttgcttaccatctgaccacttaacacccttcttaatttcaacagttacggtcttagctttttggtcaaccttaattgttgcagcacctttatcattgaaaacatagtgatcatcagtaccaaaaagtgattctgcaccatattgcataacttcagtatcagtagctgaagttgaaagttcgtcgttgaagataccagtaaatggggtatcagcttcaacagcaaccttaacagtaccgccattcttagtagccttagtaggaacagcttccttaaacttagaagcagtctttgattcatcagaatgagattctgacttaccacaggcagctaaggtaagagctacacctgataacagtgtaataccagcaaaaagttttgcctttttcattagtaaaattcctccattacttggagcaagttgatcctttaattttatcactattacaaaaacataacaatagcatgaaaaagacaggtatttggattaagatacctgtcttttctattagttagttattagaatttaatataaggaatttgtttatgtttagaattttggagtttagttttactaatgattaatgaattacttagcgtaaccaacattgtaccaaactgagttagcatctgaaggcttaagtgagtagccagtaagcttactattcacagcgtcaatttggtatgcattaactgttggcacaacatatgcttcatcaaacatatacttctgccattcgtggaatttttgtactctgtatttattattaaatgccttttgtgagtcaatgtccttaagaagctgagtattcttcttagttacgaaacgagtgtagttaaatggtgccttttcattgtaaagatcgttaggagaaggttcgctagatagtgaccaaccagccatgaatacatcaacgtctttagagtcatgttgaactttatcatagaatgaattgaattcaattagacgaccagttgttaacttaacattcaagccgatcttcttccattgttgaatgtagttctgagtaattggttcagcagtagaactaccagacatagctgcaaggtgaatggtcaaaggcttaccatttggttgaacacgatacttacctttcttcttgtagccagcgtcatcaagtaacttattagcctttttaaggttataattgtatcccttaatatttttgtcaaagtaatttccaaattgttcaggaattaaagtaggtactctgaatgttaagccttgagtataacgcttttccacagcatcaatgttcattgcataggccattgcttgacgaagtgacttattgttcatctttgcctttgggttcatgacattcttaccattttcccacttaccaaccttgaagcccatgtagctgtattgaagtggtactttagcaacaaagttaacacctttagtgttcttaacctgttgccattgtgaattaacaactctagcaatatcaaatttgtgactcttaatagcttgagaagcagagttagggttaactacagataccgtaattttatctaattttggagtacctctccagtagtatttattaggaacccaagttactgattgaccacgaacaattttactaatcttgtatggcccaaagaacaaaggattcttacgaacagcatctgatgattcaagcttattaaatggaatactctttaattgatgatatggacttgcggtttcgaggaagtatccgttacctgattgaagcatcccaggtttcatttccttaaagtgaattacaactttacgtccatttgctccatctggcatatcaatacctgaaatagtcttagctttgccatcatgatattcagttacaccaacaatgttttgaagtgaagcagtataacgttgagactttgtgcccttgttagccataacttcatattcatactctacatcttttgcagtaacctgcttaccatcttaccacttaacaccttttttaacttcaatagtgatagtctgtaagtgtcaatgtttttgcggtagcctttaaaccattagtctaaccttaatttcttaaatatttatatgacttaaatttctgcttagcttgcttaaataactattgccagctacctgtgcggttaatgcgccatgctggatgcctaaatgaacttcatgacgcttctttaagctgtcacgggccgctgcttttaattcctgttcagtcaatacagttatttctgaatcttcaaactcgctgctaagccaaaattccagctctcgattcttgatgcagcttaagatcctaagcatgccttctgctccagattttgaccatttcttgccttgccccttaacacggtaggtatacttgcggtggttgctctcgcagcagccaatggctttagtcacagtcagttttcgtttcttaaacggcttaatatcgtcccaatgacgatcaatataattccttaggcgccccagataatcatgattgagctcggtattcaattcatcaattagtcggctttctgcagtggttaggatagttttaactttgtcatagctgtatttgtattccaaagcagaaatcagcttgccttgcaggtcaggcgcaaaatatagcctttctttgattttcttatttaggtgaaagacatccaagaaatgctcatgacgcttgcatagccctacaatgtcatcgaagtctgttttggcatatccagcaccgccatcggcgttgctaagaattacagtatcagaaagatcataagtattggccaggtactccttggcttcgttcagcgcatcaagtcggcttaaagaaacaaattccttggcattgattcgctttctgcgtttcttgcttatattgacaatgccttcacagacctgatagcgatgaaattccaaccggcttttagtgcctttgatcaccacgccatcgccttcaagatacaaaactgggacctttttcttagtgcctgcggcatcatatcttgaatctgcttcttggcccgctttaatatttttcccggccatttttaccaaattgcccacctgcatatggctaatattaaagccagacaggcaattgactgctagagcagtattgcgataagtggcaacgctgcttacttctaagatgtttttgactgctaaaatactgtagcgcttgtatttgtcaaagcccattaattcatccaagggataccttgcttgtttgcctgggcagacatatcttcttctgacatacctaacttcgccaaaagccatattgattgagcgctcattcttcttatcaatctgatagccctgtgctttaaccttggtaatcatttcatcatcaactttagctaaagccaaggccatgatttccttaatcaggtttaagaagaaacagattatttttctttcacgcttaatataattatcttcagactttataatatttgcgatttcagttacaattgaattcataaaagaccagcttctaatgtgttttttgttcttaacatcagactactggtctttttgtttgagctcaagtccaaattcaaaggacttgggcttttttaattatttattcaacttaccgtaaaaaattatacacttagtgatagtcttagctttacggtccaacttaaaagttgcaggtcccttgctattaatcttgtaactgtcatcagtatcaaataatgattcattaccaaactgtgctacatctgtgtcaatagcagaagttgataattcattgttaaaaatacctgtaaaaggtgtatcagtttcttcagcatatgataaagtgccgccctttttgactgccttaactggagtagtttccttaaacttcttggcatcctttgcgccagcattgttactgctactcttaccacaagcaactaaagctaacgctgccgcagaaacgactcctactgaacccaatacttttgataatttcatactttgtttcccccatctaggatacaattcattttcaatagttatttgaatcaggttgatgattaaataataccaccataaattaaaaattcaatagttttatgaaattatttttaatttttattttatttgctttcaataagattctagttataaatatgcaaaaacagctctaccaagcgatagagctgttttaatttaattattactttattagttttcacgttgtcttgcgtcaccagcacgttgtaaggcttgaccaacatagttaatacttaaggaaattaccaaaagcaagatagtagctggcaaccacaaccatggacggttaataacgttaactgggtcattagcaaaaccaatcaaagtaccaagtgatggcgtggtacttggtaaaccatagttcaagaatgaaagactagtttcaataccaatgttacctgcaatactcaatacaacgtcgataataatcattgaagtaatgtttggcaaaacttcacggaacataatttgtaaattagatgaacctgaagtcttagatgctaaaacatagtcacgaccacgctgtgataagacgaaggaacggaagtaacgtgccgtcgttgtccacccaaacatcgcaatcaagaataccaaagttacagcattgtagttagggataacagtagtcaaaacaataataattggcatttgtggcaaaatctgaatgaagtcaacaactctcatgataactgagtcgattgcaccaccaaagtagcctgataccaaaccaactactaaaccaactatttcagtaattacagttactgagataccgatcatgattgagttacgcccacccatgatgagcaacttcaagatatcacgaccaccatcatccgtacctagcaagtggcccgcttcaccccaaccatagtatgagtcagcaatattcatttctgttacttgggcacgattcaagaataatgaacctccaaaagtaaacagtaaaatgacaataatgataatcagagcagttaaagcagactttgaacgcacaatttcacgcattgccaccttgaatccagaaggtgggagagttgctttttgcttttcgtcttttttagtagctttctttgtagctttttctttcttatcagccattttttctctccttcctattgaattctaatacgtgggtcaatgatactcatgatgatatctgataataagttaccgattaaagttaagataccaaagataagaatcaaggcagtcaaggtagtgtagtcacgttgcccaattgagtcaaggaacaacttacccataccaggataactaaatacactttcaatgatcattgaaccactaagaagaccggtaatcgtgttacctaagaaggcagcgattggcaataatgagttacgcaaaatgtgcttatggaagacgacgctttctggaacacccttactacgagcagttcttacgtaatcttcaaccttgttatcaacaatcccagttcttaagtactgaacagtaccagtagtagtaatcaaggcatacagaattgctggcaaaatcatgtgatagattctactgccaagtacgccccagaaaccagaggcactagctgaaacagaaccagaaattgggaaccaacccaaggtgaaaccgaagagccacaaacctaagatgtagaatacgaatcctggggtagccaaggtgatgtagttaaaaattctaacactagtatcttgccattcgtcttggtgacgacctgaagtaataccaagagggatagcaatactataagtcaaaatagtagttaaaagtgataaccagaaggtgttgttagcacggtcagcaatcaatgaagttactggcacatgttgaatgtaacttgtaccaaggtcaccatggaacaagttgcccacccatctaaagtattgcacgtaccatggatcaaacagacctgcagcccgttttaaggcttcaatttgtttagggtcggtgttagggttaattgatccactgaatgggtcaccaggcatcattttagccaaaaggaagaccagcaaactcaagataatcaattgagggatcatgattaacaaacgccgtaaaatcgttttccacatgcttaatcactctccttttcttctaattcttcaagtttagcttcgtgggccatatcttttggcaaagctacccagtgcttaggtgctacttgttgtaatggatatacacgaccatccttgtcgtaccatttactttgattttcttcaaattctttttcaacttgttcgcgatgtttcttgtgttcttcacgatgttcaacatcaacttgaggaatagcggaaagcaaacgcttagtatagatgtgaattgggtgcttgtagatttcttcacggctacctaattcaaccaaacgaccacggtgcatgattgccaagttttctgacatgtgcttaacaacacccaagtcgtgtgaaatgaacaagtaagcaatgttgtattgttgttgaatgtgcttcatgaagttcaaaacctgtgcttgaactgacaagtccaaagcagacgttggttcatccgcaacaattaacttagggttagtagcaacggcacgagcaacaccgattctctgacgctgaccacctgagaattcatgtgggtacttgtagatcgcatcactaggcatccctacaatatccaacaattcttgaacacgatcacgttcttgatcagtagtcagattttcaaagtttctaattggctctgcaatgatatcttcaattctctttcttgggttcaaacttgacattgaatcctggaagatcatttgaacatctttattataatcaagcttcttacggttgcttgccttagttacgtccaaacccttatacatgatttgaccacttgtaactttttcaaccccaacaatcgccttaccggtagtagatttaccagaaccagattcaccgattaaaccgtaagtttcaccttcaccaattgaaaaattaatcccatcaacggcacgtacataatcagtaattctgttccaaaatccagagcgaattgggtaatagacctttaaatctttgatttgaataatttcttttgccataaactactccccacttgctgtcttttcatcctcaaagtggaatgacttccagcaagtacatcttacccagtgacctggcgcaacttcatgcaccttaggttcttcttcatgtgcgctagcaggaatccaaggaattcttgcagcaaatctatcaccagtacgtggcatattcttcaaagatggcacagtaccgtgaattacatgaagatcttcatccgtatcgtctgattgaggcattgagttaagtaatgatcgagtatatggatgaagtgggttttcaaaaattgtctttacatcagatttttcaacaatttgaccagcatacatgactgcaacttcatcagcagtttctgctacaacacctaagtcgtgagtgatcaaaataatccctgagtgagattgtttttgaatatcttcaagcaaatccaaaatttgagcttgaatagtaacatccaaagctgttgttggttcatcggcaataataacttcaggcttacatgcaatcgccatcgcaattacaacacgctgacgaagcccaccagacaactcatgtgggtacatttcgtacatttcttcaggctttggcattcctacttgattaaacaattcaatgacacgtgcgtgacgtgccttttcgtccatatcagtgtggtaataaagagtttcagcaacttgatcaccaacacgcatcaatgggttcaagctggctaatgggtcctggaagatcattccgatcttgtccccacgaatcttattgaaaagtgattcattcaagccaactaggtttaattcattgtaaagaatgtcccctgttactttagtatttttatggtcgtacaatccaatgatacttgaggcaattgtactcttaccacaaccagattcaccaacgatggctaaaatctcgtcgcgcttcagagtcagattaacatcgtctgccgcatcatagaatttcccttgcaaacggtatgccgtatgcaggtgttgaatatctaataaaagatcactctgcttctccaaaggtcattcctccatctcgagcttttttattaaaagcatttaatcttttctatttattttctaattctaaacacaaagccggtcgtatgcaaatcacgacacggctttttttagaaaattatccttgatgagacttaatatatgaaacagcatcaccaattgttttaattttttcagcttcatcatcaggaatttctgcgccaaattcatcttctagctgcaagataaattcaaccaaatcaattgaatcagcatccaaatcgttcataaaattagtgtcttcagtgatctcatccttatcaacatcaaaattatcagcgatcatgtctttaattttattaaaaatttcttcttctgacataaaacttctcctttttaataaaacattgtactatttttcagcgaattcgtctctaaaatctgcaacaagtttttctttaaccattttatctacttgcttaagagtgaaataaattggacgttcatttgatctaccgtgggttttaactaccggtgcattaacgcctagtaaaactgcaccgccatatttagccgtatcaaatttagattttaagcttgataacgagcccttcaccattaaggcacctaacttggtcattacaccgccatttaataaactatcttttaataaatgaagcaagacgctagaggttccttcaatgttcttaagtacagcgtttccggtaaagccatcggttactaccacatctgccttgcctaatagcaattcattaccttcaatattacctaagaaattcaaattactttctttaagcaattcataggccttttggtgaacatcatcacccttgtcgctttcagctccattatttaagagcattactcgcggatttttaatgccgcgaatcttctcagcatagtacgaagccatttcggcccattgtaaaagatattctggcttactcttagcattagcaccaacatcaaccatattgaagccatcgtcactattttgaacaggtaaagtaggcatcaaacctggacgaacaatccccttgattcgaccaataataaaaattccacaagcaagcaatgcaccagtattgcctaaggaaagcaacgcatcagcttttccttccttaacgaagttagctgccacaaccattgaagagtctttcttttttctgattgccttaactggttcatcttcatcagcaataacttcagttgtaggtacaactcctaattgatcattaatttgatcttcagggattagttttcttaatgcttctttatcaccaaataataaaaatttagtctcaggcattccagttttagcttgtaaaaccgccttaacgattgcatctggggcattttcgccacccatcgcatcaattgcaattgttctcatatattcaccacaatcttttctaaattctgttttgctctaattgcttatattctagcacttgcttaagtgccttatgtcctggatctaataaatcaggatcagccgcaaccaaagctcgtgcttctttttgcgcaacgaccaatgtattgtagttatttactacatcacccacacgaaattctggcaatcctgactgagccttaccaaacaaatcaccttcaccgcgcatctttaaatcttcttcagctaatttgaagccgtcattggtcgacgcaataattttcattcttgctttacctgaatcggtcttaggatcagctagaaagacacaataactttgtgtttgtcctcgaccaattcgaccacgcagttggtgcaattgacttaagccaaaacgatcagcattataaatcaccatcatattggcattagccacatcaactccaacttcaatcacactggtagttactaaaatatcgatctcaccagctgcaaatgcagtcataatctcatctttttgcgcacctggcatttgaccatgaagcaggactaccttgtgattaggaaaatcatggcttaatttttcatgcaattcttctgcattttttaagtctaacgtctctgactcggtaatcaatggtgtcacagcgtaaatctgaaagccttgatttagctgctcttgcatttgtcgatagacttccttcatttgactacttgttttccatgtggaaataattggctttcttccggctggtaaatgatgtatttcagagactgtcatatcaccataaactgtcaaagccagcgtccgcgggattggcgtagcggtcattgccaaaatatctggttgatcgcctttattaatcaaagcttgcctttgacctacaccaaagcggtgctgctcatcaataatgactagacctaattttttaaagataacactatcttgaattaaagcatgagtgccaattaccacattaatcgtgccatcagttaattcacggtagatctcacaccgctccagtgtttttgtattgcctgttaaaagagctactcgcacacctaaaggacgcaacaattcatcgatttttttgaaatgctgagttgccagaatttctgttggcaccatcaaagccgcctgatagccagctgtaatggctgcaaaaatcgcataaacggctacaacagtttttccagaaccaacatcaccctgcaaaagtcgccgcatttgaccatcagaatgcatatcagcaaagatttcattaaccacatgcttttgatcatctgataattcaaatggcagagatttagttaattgagcaatttctgtcagatcgtatttctttgcataacccatttgtttaccatcattacgggtcaataaagctaattgtaattcaaaaataaaaaactcacgaaaaatcgcacttctcttagctagttcagcctcatgactattcttagggtggtgcattttttcaataattacttggtcttttaaaagacgatattcttgccgcaacttttccgaaacaatatcctgcacttgatcaataaaatcgtcaatagccacattaattagatctactaattttttttgcttaacatgtcgattaaccggataaatcggcgccataccactatcattttctttggctgctacgaatttaaaggccgttaaactttgccgggcaacattgtatttaccataaatagctacttcttgtccgatctcaattttattttttaaccacggctgattaaaaaaattgaccatgatcacatcatggtcaattctcatcttgaaacttaagcgcgttttcttatagccaaaacgactaacaaacgcttcagtggctactattccctttagcattactttttgaccatccatgatttgatctaacggtaatgtttgtaattcgtcataacgaaaaggaaagtaaaaaagcaaatcataaatactatagatgcctaagcttcctaatgcagctgtagtctttgtccctacaccctttaagtctgtgacaggagcaaataatgcattatcaatcattgttattcaactgatactaagaagtgatatacaggttgaccaccatcatgaatttcaaattcaagatcatcatgtttggcttcaagttgttcaactacttcttgtgcttgctcttcactagcatcacggccaaacataattgtgataatttctgaatcttcatccagcatcttttcaatcatatcaacagtagtcttaattaaatcagcattgtcaaccttaatcttgccatcaacaattcccaagtagtcattcttatgaatttctacttcatcgatttcagtatcacgggtagcttgagtaacttcacctgaaacaaccgtatctaagtcctctgtcatagcttccacattttcatcaacagatgcatctggattgaatgaaagcattgcggttaaaccctgagaaatagtcttagttggtacaataccaaccggaatatcactaacttcagcagcctgcttagcagccataacaatattaccgttgtttggcaagacaatagctttcttcgcaccagacttcttgattgcatcaataaagtcttgagttgatgggttcatcgtttgcccacccgagataatacggtttaccccttcactttcaaacaacttacgaataccgttacctgaagcaactgcgatcactgcaaaatcaactgcttcttgttgttcttcatcttggtcaacgatgctttcgtgttggattctcatgttatcaatcttgatcttgcctaattgaccaaactgactaccgtattggaaaacatcaccagggtgttcagtatgaacgtgaaccttagcaatttcaccatcagaaacagctaataatgaatcgcccaagccagacaagtgctttctaaattcttccaaatcaaacttctttttatttggcacatcggcatcaagatcaaccatgatttcagtacagtaaccatttttaatatcttgagtagccaattggctttgaactgaagattggtggtgcattgcattgatcatttcatccatttcattttcgtcaggttgatattgatctgcaaagttttcacccattaagccttccaaaaagccttcatagataaacaaaaggccttgaccacctgagtcaactacaccaacttgcttcaaaacaggcaataaatctggagttgacttaagagccttcttagcaccttcaactacagctttcattacttcagttacatcgtcggtgttattggccttagtagcaccggcttgtgcagcaacacgagctacagtaagaatagtaccttcaactggcttcattacagccttataagcagtagcaacaccatttgaaaaagcatttgctaattcctgtgcagttaaggtcttcatcccttgggtagccttgtaaaagccacggaataattgtgaagtgataaccccactgttaccacgggcacccattagcatacctttagccaagctttcagttaaatcactaacactagtacttggattttccgaaacagccttagcaccactttcaatggttaagttcatattagtaccagtatcaccatcaggaactgggaaaacattcaaagagttaacaaactccgcatttttaccaattcgatgagtggcaacacgtaccatatctctaaattgcttactatctatctcatttaaaaccactatttaaaacctccgcctgtgttattcgtcaagtaccttaacgctttgtacaatgacattaacggccttagtgtctattcctaattgattcttcaaattgaacttaacactatcttgaacattcttacttacttcagaaatcttcaaaccataaccaacaataatgtacacatcaaccgtaatttcgttatcttctgacttgacaacaacaccgcgcttataattggcacgattaagaatcccgtcaaatccatcgcgaatggcattctttgatgccatacctacaacgccatagttagacgtagctgcgccaccaacaacagttgcgattacaccgtttgaaatatcaatcaaaccatcttttgtcttgatcttaacagccatgtttcgtcctccgtcttattatctatatatacgtttattattttatcatagtaacgacataatcaataattaaaatacacctgaaaaaatccttttagtattgaattgcgcgaaaacatatgataatctaattaagtatgacatcacaattaaaggaggtttagcaaatggcaaaagattacgtaacaggtaagaagactacattcggtaacaaacgttcacactcattgaactcaactcgtcgtgcttggaagccaaaccttcaaaaagttcgcattcttgttgacggtaagccaaagcgcgtatgggtttcaaccaaggctttaaagtctggtaaagttactcgtgcctaatagaccaagagcttgttagatcactgatcttgcaagcttatttttttacttattttaatgatttatataaaaaacggtaagaagaccattttattttgtcttcttaccgttttactttacttcataatattgtgatgcttatcgtcatcaggaatttcgtcggccattctttcatcaattggcgtgtatgcatactcagtaatcatttcacccaccttagttggcaagtccaaatcttgataagttacatttctagctaagccattgatagtagctacttccttcttcttctttttatcaaaaatgtgaacgtggttcttgtacatgtagtcttctacattttattttgcacggtcaagtcttgcttcgtagcgaccgttttcgaaaccagcaatatctttttcaaagtcaatatatttcatttgaattcccttgtttcttttctatagttctattttaacctataaatcatgaaaacgattaatatctttagaataaattgctgcaatcataccattttgcaagctaatcctgaattcattactattaggcaaaaattcatttgatgaaaaaacacgaggatagttcccagaatagtgcttcaactcatatcttgcaccaataatattaaaatcttcgattgcttttaaagctgcaaaaccaatataagaataattttttcttttttgaacaacatgcgtgcctgcattaaaaaagcaaattagattttgttggtcaatcaacgttacttttttcgcatataatctcatttcaggatttagcaacattaatagattgatcaaaaaatgatccaatcttccacctgtagcaccaaaaatcactaattcatccacatgataatcttcaaaagcaatctgcaacattagctcagaatcagtccaatccttgacaggattagaataacgaatgtcttgaacattactttctatttggcttaagtcattttcgtgtaaagaatcaaagtcacctactgccacatcaggtattattcccagttcttctaaaaacaaggcaccacgatcaaccccaataactaaatcagcttgagccagcttttcttcaatatcttcaggccacaattcagttggaccgcccaacaatgcatatgctttcattacttaataatcttttctaatttatgtacttgactgccaacatcaccattttcatacaagtatgaaccaacaacaaatatattagcgccagcattttcagctaatttaatagtctgatcattaataccgccgtcgacctcaatatcaaaatcagagccgacaatctctctaactgacttaattcgattaactgattcaggaagaaaactctgtccaccaaatcccggcttgaccgtcattactaatacttgtttcagtaatggcaaatacggttcaaccacttcaactggtgtatctggactaattgccaaagcagcatcaacgccattagaagctaaataatcgaaccaataatataacttaggcttgtccattgcttcatagtgtagttcgaccaaatctgctcctgcactaacaaaagctggtaccaacttatctggggcatcactcattaagtgaatttcagcatctgtcatcggaaattcacgcttgaaatctttgattagttgcggtccaaaagataaattaggcacaaaatgtccatccataatatcaatatgaaaacggctaattccggcctggactgcattttcaatatcatttttaagatcaatattatttgcgttcaaaattgagggtgcaatcatcatcagctattacctctattttaaatattccggtatgcgaccttcgctaatctcagtccgcatagccaaataatcctcatatctactttccagaatttctctggcttcaagtaacttctttacttcacagcctggctcctgcaaatgctgacatccgcggaacttacagtgaatacttgcctttttaaactcaacaaagtaattacataactcattcaacttgattggtgtcaaatcaattgacgaaaaacctggcgtatctgctaaaaagcccgcgcctaacttaaaaagttcgacctttctagtagtatgtttcccacgattcaagctagttgatatcgcaccagtcgcttgattagcatctttttttaaatggttaagcaaagttgacttaccagcacctgactgtcctgctaaagtccaaatttgatttttttcgatcattttaggaatctgaatttgcatttcatgataatcagtgaaaacaagataacctattttttgataatatgctaaagcttgcttgattgtgtttaactttgcttctgatagcaaatctgctttagacaagtaaattgttacaccaactttttgccaagaaaagaaagtcaaaaaacgatctaacagctctacagaaaaatccggttctactgcagaaattactaacaaaacatgacttacattagcaactgctggtcgcccaattcgattaatccgcggcaagattttcaccagatagctcattcctttatcatctatctgaatttccacatgatcgccaactgccggtttttgctttttttgacgaaaaacgccgcgagcacgcgttctcacgatacccgcagcggtttctacatcataataaccagcaatcaaaccaacgacggttccttgcgctagtttcatttatttagtcaccttttcattcaaaactgtatcgccattgcgaacaacctttaattgtccactaccttctctaatgttaaatggaatcgagaaactcatatcatgcttaatatacaagtcacgataaatattgttcaaggaatgatcatcatccttaatatagatctggacatgatcacccttgccattaacggattctgactcagagttattgcttcctttatcattatcaggcttctcactcttagaaagatcatcaccaacatagttaacggtaaaggtcttagttacagtagtttccttgtcttcctttggacctttcgagatcttgatggtaacagttgaaccacgctcaaccttagtacccggacctggctccatcgaaattactaagcccttctcaacatcatcagaatattcttgattgatttgtaaagtcaggccatgttctttggcatagtcttgagcactcttcaaagaataattacttaagtctttcaaggtaaccatatttgaatgtgatctagcctgcttgccacgtgaaactatcaacgtaattgtagtctgcgtcggcttaacctctacacctgcagcaatgctttgagaaataacttgattttcgtcaactttattagaatattggtcctctctaactacattaaagcccatattttctaatttttctgccgcttcggcatagttcttcccaaccatatcaggaactttaaccatgctagaaccgctggaaacaattaaatcaacgctctttccccgctctagactattgcctgcagttggttttgtcgcaataacccggcctttttttatatcatctgattgtcgcctaataatttttccaacctgtaagcctgctgcttcaagtttactctcagctgctttttctgcaatattagttacatcaggaatattaacatcctgtcgtttatttccagtaccacttaaagcgaaaatcatcataaaaatgattaaacccgcggcaataattgagatcagccaccaccatttgtgacttttgacattctgtaaaaaagtctttttctttactagcttgcttgattctactgattcggtttttgctggctccaccacttctttttcttccttttgtggcttaaatccaggcaatacaattgttttatcatcgttattaccatgatatggtacaaaaaccggttcatctgcccgttcaggatccaagctactatccaaatctgctttcatttcctgagctgtagcatatctatctcgtggatctttcgcggttgcctttaaaacaacattttccagcgcctgtggtacacttgaatctttcttgcgaattgaaggaattggttcttgcgcatgcttcagtgcaattgccactggtgtatcaccgttaaacggaacagttcctgtgatcaattcatataaaattattcccaaggaatagatgtcagattgtttagtaaccattccgccacgcgtttgctcaggagacatataatgaactgaacccattactgaattagtttgtgtaatcgagctttgattcaaagcaacggcaattccgaaatcagctattttaatattgccgcgcttatccatcaaaatattctgtggttttagatcacgatgaataacattgtgcttatgagctaatgcaactgcactcaatatctgatccataattcgaataatttcatttaaatccaaaggtgaatttttttgaatatattcttttagattaggaccatcaacatactccattaccatgtatggcaaaccatgatcggtacctacatcaagtacagaaacaatattaggatgacttaattcacttgtagctaatgcctctctttgaaaacgagcttgggtttgcggttcattctgcaaatcaaggcgtaaaattttaactgccaccttacgttgcaggataatatcttccgctagatagacattggccattccgccttcacctaaggtatcgatgatgcggtaacgttccccaagcagataacctttatcgatcactgctctcgtcctccttgttccaaattaagcagacagtaatattatcaccaccacctaatcgattggcctcactaatcaatttattacaacgttctcttaagctaagctccttagttgccaaaatttgttggatttgtggatcgctaagtgaattggttaggccatcagtacagagcaaaataatgtcgttttcccccatcttgatctcatcaaattcaggatcaatcgtacttgagacgcctaatgcttgcgtaataatatttttctggggatggtgtttagcttgttctttagtaatctgacccatcttaactaattcgttaaccaaagaatgatcttcagttaattggacaaatttaccttcagaataactataagcccgagaatcacctaaatgagcaattaaggcatttttatcaaatgcaaacgccaatacaatcgttgtccccattccatttaagtcaggaaacttatcagcagtctttaaaattgtttcattttcagaatttaattgcacatcaagccatttatgagcgagattagcatctgcaaagtcagtcatactaaaattatgtcctaaatgggtgactgccattgttgaagcaacgtcaccaccttgatggccgcccataccatcacagacaattgctaagacaattcccttttgatttttaaaaacttttacaaaatcttgattgcttttccgtaccttaccaatactcgaagcgtatgctgtttcaatcaaaaatctaacctcgtaacttaaatttagcaatgaaaaatccatcattgccatctagatcaggcattattttcaacatccctgtctttgattcaagtttagttaacttaaatggaactagttcaaagtcaggatgtgcttgcaaaaacttcttaactacctcttcattttcttccattgaaattgagcaagttgaataaaccaactcgccattcttttttaagagtgaacttactgcagttaagattgccaattgaattttttgtaaattttgtaagtcctgttgtctcttagtatagcgaatttcaggcttacgacgcaataatccaagcccagaacaaggggcatcgactaaaatttttgtaaattcacctgccgcaaaaatctctgtagccttacgtgcatcacatgccttagtctttaccttatttgcaacgtgcattctctgggcattatctcgtactaaacgtaattttttatcatgaatatctaaggcagtcacatcaccattaacaatgctttcggcaatttgcacggttttcccaccgggagcagaacaagcatcaagcacatgctcatcttgttcaaagtcaaaagcttctacgactaaactggcagcttcatcttgaattgttaacttgccttcttcaaacaaatcactttcgctaatgccaccgtgactcaaaatcacatcatcgcttgataacttagaccattgtggttgatagttatcccgctctaactgggcaaaaacttgctctttatctgccaactttgaaatacgtacactgtttttagctggctcattaatactgtttaaaactgattttgccttgtctaggccccagttatcaattaaatattgaactaaccattcaggtacgctctctttgacacttaaatatttaactggattattttcagctggtaaaatcaccccgcgcctagtaaacgaacgcaaaatcccatttaccaaccgaaagccagctgaatgtcgcttgccatattgcttagcaagtttattagcctcatcaagtacagcacgatcaggcactttatccaaaaaaatcaactggtaaagtgacattaacaataatggcttaatatatttttcggtcagttttgtcctaactaagccttttaactgatattctaaaaacaatcgatactgaatcgtgccataaacaatattagtagctaaattttggtctgcaattgacaagttagagtgctttaagctgttattcaaactaatattagaataggagccttgatctaagaccttgatcaatgtctctaagctgactgcacgtgcactcttatcgatcgacaatttcttcacctgggacaaacttactaccttgaccatttaaaaagctcttgatgtccattctctttttgccacttggttgaacttcaagtaagttaagtactgaattatcagcaaaactaatggcaaaacgtcctttgttagcaacaacagagccggcatttaaacttgatgaatcagatgcaatttctgccttccagatcttgaaacgtttgccttcaatcatcaaataagcaccaggatctggattcaaagcacgaatcatatcgttggcctcttctgctgtcatatcaacattaagcttttcttgttctttagtgatgttaggtgaaaagacgaccttttctggatcctgtggaacctttttaattgagccatcaataattgctggtaaagtcttaagcaataagtcccgcccaacaattgataatttactaaataaagtgccagcgttatcatcaggctcaatcttaattgcttcttgagcataaatatcaccagcatccatcttcttaaccatttccataatggtaattccagtttctttatcaccgttaattagtgaatattgaattggtgcaccgccacggtatttaggcaaaagtgagccgtgaacattaactgccgcaattttaaccgaattcaaaaacttagttggtaaaaattgcccatatgctgcagttacaatcaaatctgcatgcatatcaattaatttctgcatttcgtctgatccagacaacttaaccggttgaaagattggcaaatcatgcttttctgctgcgatcttggctggtgacttagtaattttctgcttacgtcctacctttttatcaggttgagtgaccacggctttaatctcatagccttcatcaattaacccttcaagtactggaactgaaaatttcggtgttcccataaatattattgatgtcattaaagcatccccttacataattctctctggttcattatcaataaaaatacttaaaccatatttcttagcttcctgcgcggaatcttgaacatggtgtaataattcatttaaatttggttcttttttatattttaccagtatttgataataatatttattttttacacgagaaattgcacttggcgttggtcccaaaataatcgttggctcatgcaagtgctcattcaaatacctcttaatcctaaaagcctcacgagctgcattctgttcttttttagcagcaatggaaatcagcacggtataaaaatatggtggatagttaccagcatgccgcatattcatctcatagccataaaatcgttcgtagtcctgagtttgagctagttgaatagcataatgctctggattataagtttgaattaagacttccccttccttatcagcacgacctgcacggccagctacttgagttaataattcaaaagtcttttcagaagcattatagtcagaaagccataatcctgtatcggcattgattactccaactaaagttacattagggaaatctaatcctttagcaatcatttgcgtacctaacaaaatatcagcttcatgagcaccaaaggcatctagaattttcttatagctaccctttcttctagttgtatcaacgtccatccgcaagattcgtgcaccaggcagaagctcttctaattcttcttgtaccttctgtgtacctgcacctaaaaaacgaatttgcgagctttggcaattaggacaacgtgtgggtactggctcagtatgaccacaatagtgacattgcatactgttagtatccttatgcaaatttaaagaaacatcacaattaggacattttaatacaaaaccacattcacggcaaagcataaaattagcaaaaccacgtcgattgagcattaaaataacctgctctttttttgccaaacgcttttttattgcatctactagctcaacagataaatcaaattgaccaccagcaaactgcacgtgctttagatcaatcaaattaactttaggcaatttcttttgattagccctttcagttaaccgtaaaagatgatagacatttttttgggcgcgtgcacggctactcaacgatggtgttgcacttcctaaaaccaacggacaattatgaaatttactacgccaaatagccacatcacgtgcattataacgtggatcggtttcttgcttatatgaagactcatgttcctcatcgatcacgattaaaccaatattatctagtggagcaaaaactgcactccgagcgccaacgaccaccttagtctcgccacgacgaattcggcgccactcatcatatttttctccctcagatagggcactatgtaaaacggctacctcttgaccaaaacgtgccttaacctgacgaaccatttgcggcgtcaaggaaatttctggcaccagcattaatgcatttcgcccctgtttaagagccttgctaatagcgtgtaaatacacttcagtcttcccgctaccagtaatcccttccaacaaaaaagtctcagcctggcgctgttcaattgcttgggtgatctggttcaaagcaccttgctgctcaccatttaaggtaaccgctgttttatgttctccgtcatcaaatccggataacggatcgcgataaacctcaacactttttttattcaaccaacctttggtaatcgcagaattcaaactcgccgccgtcaatccaagctgtttttctagctggctttggcttttgggataatccgctgcattatcaatgatatccatcaataactttttttgctttaccgcattttgacgtaaagtattgtaaattttgggatattcctctttttttaatgctagttcatattgattttcttttttcttcttggctcgattttctaccacatactcaatctttgcttgatcatcttgcaataatttgcggaattgcttaatctccgccagatccgtaattttatttaaatcaattggatcaccctgaaacagcggcattttggcagctctatcattagctggcactagcaatttgcgataatttgctcgcattacccaaggtagcatcgcttgtaaaattttaattcggtaagaaaaaatattttttgctaaatcagcagataactttaccaactctggcgtaagcggtggcatctcatctaccacaactagcaaatccttaagtttacctttaaattcactttgatcagtgatccccaccacaaaaccttgcactttacgaggaccaaacggaacaactactcttgatccaatcgcaatatccttttctaattctgttggaatatgatattcaaaaatacggtctgtttgccgtgcagctacatcaacaataacctgagcaatcatttaatcacctgtaaaaaagaccttcaccccaaaggatgaaggtcaataaattaatcttcgaggttaacctcggcatgagctgggtcaacagtaactttaccagcagcaatttcttcaagtgccttaccaacagccttatcacacttaaaatgttccaaagttggtggatcaccagcttcaagttcatgtgctctcttagcggcaagaacagataatgaatagcgtgaatcaacacgtgacaataatttatcaattgatgggtaagtaattctcataataattaatcctccttgaccatcttacgatagtcatcaattacacgtttaacactgacatgttctgcatcgacgatcgctttaatatgatcaactgcattagctactgtatcattaactactgcataatcatagtcttccatctccaaaatttcattgcgcgcttgcttaattcgaccacgaattacatcttctgactcggtgccacggtgttccaaacgcaaatgtaacgtatgtagatctggtggggttaaaaagataaacacgccatcgggcatcttttcacgtactttttgtgccccattaacatcaatctcaagtaaaacatctttgccatcatgaagcatcttcttcactggtgcaagaggtgtaccataatagtgaccgacatatttattatattctaacaactcaccatttttaatagcctcttgaaagcgatcttcactaacaaaaaaataatcttggccattaacctcacctggtcgcggttgacgcgtagtcattgaaactgaatattcaaatggaaagactttgttttcaacaatcgcgcttttaacagttcctttaccaacgccggaaggaccagaaagcacaagtaataaacctttatctgccatgctgaactcctcttaacttgtaatatatctagtttgcactaaaattgtttctttttcaagttttctctttgcatacaaaaaaacagacaaaatcgtctgctcctttactaaattattttctcgaatgtctcacacactacttcagtttcatctgtgaactctcgtcccagttcttgacattcgcgcgcaaaaaatttctcgtgtactttacgccaagattcatatgagcgatcgccctcgccttctaaataggcatgctcagctgagacatttttaaatggcataatctcaacagtcttattttgaatcacacaaactggttcatttcgtccatttaaaacaattgcgtacatccctacaaccggtacatcttcttgcgcagaatacaggctagtcgttgccgtcttaattccacttttgaccaaatcactaagaatatctgcatcccggctattagctccaaaagcaaaagcaccttctaatgctgtaggacttacttgatgttctacacaaaaatcacgccaaaatttactaatactagtcatctttaatactcttaatcaaatctgcagcattcttctttgctgcatcggttacatcttgtccagccatcatctgtgcaatcgctgtaatggtttcttccttgctaagtgggcctatttgagtaaaggttgaaccatcttttacttgcttagctaccaagtagcgttgatcacccgcggcagccacttgtggtgagtgcgtaattgcaattacctgcttgttgcgaccgattgagtgcatctttttcccgatagcagccgatactcggccagaaactcccgtatcaatttcgtcaaaaatcatggtacccactggttcaactcggctgaagattgccttcaaagctaagatcaatcttgattgttcaccaccagaaacaattttaactaatggcattaaatcttcacctggattaggtgcaattaagaaaacaatcgcatcagttcccttatcggtaaatgtctttgtttcatcaaaattaatagaaaagcgagctttttccatgtagagatcagctaactcttgcttaatctgctcttccagagaatgagccactttttcgcgtattaaatgcagatctctagcttcttgggtcattctttcttcaatcttggcaacttctgcttgcaatttttcctcatcaaggccgcctgtttcaaattgactgagttctttttgtactttttgataaaaagcaaacacatcagccaaggttgggccatacttctttttcaatgaattcaaggtatccaagcggttagtcacgtattgaaaacgttcctcatcgaagtccattgcatccattaagttcgataattcactgcgggcgtcatttaaagcataaactccatcatcaactgtcttagcaaaatccttaaattttgaaccaaattcagttaaatcagtcgcagcattttgcgcatctccaagtaaagttgcaattccatgctcatcgtcatcatacaattgcatgaagtaattcgccgtatccgcaattttttgataattatttagttcgttatattcttcctcaagtttctcatcttcttgtggatcctcaaggtcggctgcttccaattcattattctgaaactgcagaatatcttgcttctgagctaattcttgggcatcttgacgcaggtgcagcaattgactggttagcttttgccattgagcataatcagtttgataagtggctaaatctgccttaaaagaagcaggggcataattatcaactaggtcaatctgccggtcctgatccatcaaaatttgctgatcatgctggccgtgaatatcaaccaaatagctaccaatctcgcgcaaaacattaatcgtcgtcaattgcccgttaatccggactacatttctgcccttgacagctaattcacgactaatcaccagctgatcgtcatcgtgcggcaaaccatattgatcacacaattccgcgatcttttctttttgatcatccaattcaaacaagccagtaataatcgccttggactcacccgaacgaatcatttctttttgaccgcgaccacccatcagtaatgaaacagcatcaataataattgacttaccagcaccagtttcaccgatgattaccgtcattttttcttgaaaacgaacctttaagcttttaataattgcaaagtttttgatatctagctcaactagcatagcttcactcctatagaccacttacggcgcgctcaaccacttcagctgggctcccttgccataagttgcggccaccatttgcttcgtctttttgtaaatgaatcaagaattcaatattgcctttgccacctttaattggtgaataatcaacgcctaaaacattgaagccgatctccaatgccttttgcatggtgtgctcgattaccgccttgtgcacttcatgatcatgaacaataccgtgtttaccgacattctcagggccagcttcaaattgtggtttaatcaaacaaacggcatcacattgattcttcaaaattgcatacatcggtgccatgatcaaatctaacgagataaaggacacatcggtcattgcaaaatctggcagtccttgatcaaaatcttccggcttcgaatagcggaaattctgcttttccatcaccactacacgcgggtcgtcccgcaattgccaagctaactggttgtagccaacatccaaggcatagaccatctgagcaccgttttgtaaagcaacatcagtaaaaccgccagttgatgcaccaatatctaaacaaattttatttgttaaatcaatgtcaaagaccttaagagctttttccagtttaaagccgccacgcgaaacatatttcttaccatcatctttcacgtaaaacttttccccttcaggaaacttagtcccgctcttatcaattcgttgatgattgtgatcagaaaccagccccgccataatcgctctttgggcagctgaacgagaatgaaaaattccttgttctgctaataaaatatctgctctttgttttgccatttataacaccttttgataaagatctaaaaagccagttagcacttcgccatttagtccatgcaaatcatcttgtgcttgcttaattaagtcagttagttctttgcgactttgatcaattcctaacaaagttaaagtattattctttccttcagcttcatccttgtgcgtagctttaccagcttctgcactagtttcaacgacatcaaccaagtcgtcatagatttggtatgaacgaccaaaaattttggcaaaatcgactaattttacctgttcaatatcactagctcctgcataaactgcagccatctcaacgctagcctgaattaagcaaccggtcttcagccattccatcttattgataaacttggcatcacccgcaacactagcattgttagttgaatcaatatccaaatattgaccgccaaccatcccattagggccaactgctttggtaattaaatctaccaatttcgccgacttactgccttccgcaatccattgaattcccatcggcaagagcgcatccccagctaaaattgcctcagcctcgccccattttttgtggctagtcagcttaccgcgccgatagtcatcgttatccatggcaggcaggtcatcatgaatcaaggaataagtgtgaatcagttcaatcccgcaggcaatcctaatttcaggttcttcaatctttctgcctaaagcatttaacgtagctaaaaacaataacggacgcaagcgcttgccgccacccatcactgagtaggccataatctgactgatcttttgatcttcaacctcactagccaaatgcttagccagataatcatcaattactggggtccattcatctttaaaataagtaaatgctgtcatatttattcctctggtgctgatgcgttatttggatctaatttgtgttctgtgccatcactatcaatcaacttagccacagtttcttcagcactgttaagcttcttttctaaatcacggctaatctttacgccctcctgaaattcttttagggcatcttccaacggaacatttccgttttccaaattttgcacgatttgttccaaattagttaattgttcttcaaaattatttttcttcactgccattttgttcttcctttacctttgtaaccactgcttcaacttgtccatctttaaaatgcaatcgcaaatgatcatccttttgaacttgtttcacagaactaatggttttcccttgttcatcagttgaataaacaaaacctcgctctagcgtcttcaaagggctatagtcatccaactgctgcattacttgggtaaaactattgcgtttatttttcaaatagtgctgcatattatcaatcagtcgttgctgtaaaaaatgctcttgttgctgcatctggccgattctcttatctggactaacgctaaacaaacgctgcttcaacagttgataaccttggacagaatgggtcaaccgattttgcatactattttgcagcctttgttttaattgatcaacttgttgaatctgctgatcatacagtctagtcggctcgcgcaggatgacagaattctgcacccgacttaagcgctcacgtttcgaacgaataatattttgcatgctagctaccaactggctggttaattgcttaatatgcgcaatttcgtccaatgtattaggcgtagcatattctgctgcagcagttggtgttgctgcacgcgcatcggccaccaaatcacacaaggtagtatccgtttcatgaccaactgaagaaattactggcatctgcattgcgtaaacttgccgcacaacctcttcttcattgaatggccacaaatcttctagtgagccaccaccacgaccgatgatcatgacatcatacttgtcgccttgagcggcaatctggcgcattgctctcactaatgaatccgctgcagtatcaccctggacttgcgcaggatacaaatcaatctcagcatgcgggaaacgccgattagctgtaaccataatatcgtgaataactgccccagaagcactagtaactactgcaattcgatcaggaaaatgaggcaacttcttcttatgctctggatcaaacagaccttctttggctaatttggcctgcaactgcttcaattgctcatataaggcacctaatcctgccggttccatttgttcagcataaaactgatacgagccctgtgggccatacacgctgacatacccaaccacataaaccttcattccttcttctggtttaaatttcaccttatcaaagaaggaacggaacatcaccacattaattttagatttttcatcttttagtgaaaaatactggtgcgaattacgccgataacggaagttggacaattcaccttgtaagaagaccttatgcaggtaaggatcattcttaaatttttgcgtaatataataatttaaatcagtaaccgttaaatatttattctcggccattttgtctcctagtcaatttaacaactgcttccattaagaattgtactgtaagaggacctacaccgccaggaaccggagtaatatagctggctttttctttaacattatcaaagtcaacgtctccgactaatttgccattaacatgattcatgcccacatcaacgaccactgccccatctttaaccatatctgcagttaccaaaaatgcttgtcctgttgctgaaactactatatcggcttgtcgtgtaatttcagccagatttttagtatacaaatggcaaacagtaacagtagcattttcctctaacattaatgccgctactggtttgcctacgatattgcttcgaccaataactacaactctcttaccagccagcgtaatttgataatgtttcaataaagcaataatgccttctgcagtagccggttcaacaaagtgattttccatccaaagttgaccaatattcgcaggcgttaaggcgtcgacatccttattagggtcaatcctttttaacaaggcatctgcatcaatctgttcaggtgctggcaactgtaccatcaagccgttaatctcaggatcagcatttagcttatcaattaatgctaaaacttcttcctgtttagtatcagcgggcatttgataaatatcttggataattcccatcttttcagcccgccgcttttttgttcgaacataaatcttgctagcaggatcatccccaatatttattacgcaaaaatgtggcgttattccctcttcttttaatttcttaactttttctttaagattttgccctaattcatttgcaaatgctttaccatcaagaatctttcccataaagcccgttctccttttgtaaaaaaataactggcaaaactgccggctattcatcgctatttaacaaagtttgctaacattccattaataaatggcttttctttaggctcagcaaattcgtcacataaatttaaagcttcgttaactgctgccttagcatcaatttcatcgctatgcttgatttcaaataaagcaacttccatgatggctaccacagtttgactcacacgttcaagacgccagccctttttcaaatgactagttagttcagactgtaaatttttgcgatcttctagtacgccttcgattaacttcttagaataggcagaaagctgttttaaattaagcgttgcaacgacttttgcttcaacttcttcggcagttaaatctggctcctgattagccaaataaacggcttgcatagcaacttttcgactttcgtgttggttcattatttttcttcttcgtcctccggaaacagctctgatgtagtctggtcagtattttcatcttctgggaaaactaaaccgacaacatgaacgttgattgccttcagctcaagatcagtcatttgcaataattgtgccttcaacttcttttgcaacgtcattgcaaccttaggaacgttaacgccgctttcaagataaacataaatatcagcaattagcttattatcgtcatcaacactaatatttacgcccttaccatgatcttcacgaccgaaaacccagtttaagcctgatttcaaactgccgcgcattccggcaacaccatcaactttttctgcagcaatacccaaaataacttctagaacacttggatcaattttaatttgctcgctgttttcttcaccacttaaaagaatttttgaactatctgccattttgttacctcaaataaactacttatttgcacgtgatacgtaagtaccatcagcagtgttaatagttaaaacgtcaccttcgttaatgaagaatggtacgttaactactaaaccagtttccatagtagctggcttaccaccacctgatgaagtatcacccttgatgttaggttcagtcttagcaaccttcaaatcaaccgtattaggcaattggatacctaaagtttcaccttcgtgcataactacgttaacaatcatgttttccaataagtaattagcttcatcgccaatttgttcatttggaattgctaattgatcgtaagtagaagtatccatgaatacataacttgagccatcattgtacaagtattgcattgacttagtttgaatgtctgcagtttcaaccttagcagttgaacggaaagtatattcttgtacagcaccagttctcaaactcttaagctttgaacgtacaaaggcactacccttacctggttttacgtgttggaattcaacaatgcgccataaatcgttgttgtattgaatagtcaagccattcttgaattcgtttactgaaatcattgtcatattaagtccctcatttctacaattattatcttaccaatcttgaagcgtttttaccataaatacgataaattaaatagctattatagggaaatcaattcatcctttggcaaagtggataaagtttcaggcgtttgatcatggaccaaaatatcgtcttcgattctaacaccgcccttgtctggcaagtagattcctggttctacggtatgaaccatattattgaccaatttagtagttctaaaaggtaaagctggttgacacaattcgtgaatttcaagaccaatgccgtgaccgatcccgtgtccaaaatactgaccgtaaccttgttctgtaatataatcacgtgctgctttatcaacatcatatccagtattacctgcaactgccgcggcaatgccacggcgttgtgcttcatgtacaatatcatagattttatgcatttcagcatcaacttcacctaatgaaacagttctagtaatatctgccgcataaccgtgataaaaactaccaaagtcaatgacaatcatatcgccttcggacaattctttgtcactagcaacgccatgagcccaagccgaacgcacaccggaagctacaattgtatcgaaatcagggccatcgccgccattaactttaaataggtagtccaatttagcaccaattgcacgttctttaacgccaggcttaatcatcggcaaaatacctttaaagctttccattgaaatatcaattgctttgcgcaatgccgcaatttcaagatcatctttaatattacgtactcgttcaaccaattcttcaaccatcacaaattcaagttctggatttagttgcttaagtttttcatattcactcgctgaaacgaattcaccttcaactaagaccctcttgacgtccatttttttcaaggccttagtaagttcttcataatcactagaatgtttcattacaacatccatttcgccaggtgcttgtgctttaatctgtccagcaaaacgagaatctgataaaagtactcgttcgccactagcagtcaaaattaattgtgcttcttcccctgtaaaattggttagatatcgataattagcttgattaaaaataatcaatgcatctgcatttgcttctttaattaaatcagttacatgctcaattcgctggttaattaaggataataattcttgcctattttccatctcagagaccctctttttgtatgatattggtttaattatacatgtttctgggcggaaaaagccataaaaaaagacgggtggcttatgctactcgccttttcatgttaatctctgaattacttagcttcttcagctgggtatacagaaacttgcttcttgtacttgccaagacgttcaaatttaacaacgccgttaacaagtgcaaataaagtgtcgtctccaccttgacctacgttcttgcctgggtgaaccttagtaccacgttgacggtaaataatagtacctgcgtgaatagtttgaccgtcaccagccttggcgcctaaacgacgaccagctgagttacgaccgttggcagtagaaccaccacccttgtggtgagcgtataatttcatacctaaaatgttcatattcatttcacctctgaattaagcttcaatcttttcaactgtaaccttagtgtaaggttgacggtgaccatacttgctgtgtgagtgcttcttaggcttgtacttgaaagttacaactttcttttccttgccttgcttttcaactttagcagttaccttagcaccatctactaatggagtaccaaccttaacgtcgtcgccattagcaacaaggataacttcgtcaaaagttactgagctaccttcttcagcatcaagcttttctacaaatacgctatcgccttctgcaactttgtattgcttaccaccggtcttaataattgcgtacatttgtacacctccgaaaaaaatacttagactcgccgaactggggtgcttcttacataagaagacttctaacctcaagccgtgcggttgcagatgtggaggtctccacaaatacaactcttatatcatacaacgcttttagactaagatcaattatttttttacattcgccattgaccgccatgcacttttgcaacattttcggtaatgataaacgcatcctgatcgatctcatgtactttagaaataagtggcccatattcacgtggatcaactacgattaataattgacgcttgctttcgtcgctatatccacctataacatcataaatcgtcaggccttgataatcttctttaagcatatcttgaattcggtctaaatctgaattactcataattctgacttgatactttttatcaaaaccggtctccgcgtagcgcatcgtaatggcagttaccacttgagaaaatgctgctaagaagaaagcattccaaccatcgacaaaaatgttcaagaaaataattaccatatcaatgcataaaagcgtagttgcaggatttaaataaaaatatttcttcagaatcatcggcggaattgttgtcccaccacttgaggcattaacgcgataaagtagcgaaactccaagtcccattaatgcaccaccataaattacggctagtaggtcattattcactgctttaaagctaggcgtaacttccatcaaaactggtaagagcaaactacctaatgcaatattttgggtagtctttttgcctaaaaagattgccgccaaaatcagcatcaagccattcactacaaatactgtaattgatcgattaatcccccagaccgcatcgactagaatagaaatacccgttgagccaccagctgcaatattaatcggtccataaaaaagattgattgatattgcgattatttcaagtcctgctaaaaataccaaccatctcatccaggaacgttgtttaatgtttttcattattaagcgtcctttcttttagttagtactattttaacgaaaaatcatctgttagctcaagcaaacaaaataatgttaacaaattatttatttttaacttctttataatcgattgattgcgttccttcataagcaggtaaaccattttcagctcgatataatgctcgctcaaaagagcggtagcctttagatgaagaaacggcaaatttaacaccatactttgaagcgaattcctgaatattccaagtagcatcatgagcagcataagctgtcatcaagattacaatatctaagtctttgatttgccgttccattaccttcttcttgccttcaaaagcatctattggaattgggatcccattatagcgcgaaacaatcccttctaatattccttcattttgattatcaccaatcgcaattcccacccgctgatagtgcaaattcatgtcgagtttagttaactcttctgtttcttctttctttgacttatttttcttttgatacgacagatctgatttcttaggcggatcaacttgataaatccaacgaatctgtactgcctcagcaggatttttcttaatgcgaacatcacccgtataccaagctagatctacaattgaaccatcttcaacatgaatattttcaccttgataataacttgaatcaaccggaatcgtgatatccttaccgcgaattctcaacttttcgcccttaatatttctagtgatagctaattgattggccttgccgcggaccacagcataccggaattcttcgattgggtcataatcacgcatgcgcaatttgcgataacccaccacgcgcaagacttctgcttcataatttggattatctcgattttcaatagcttcaactatgtcaccgctctttaaattcaaagagtgaatttgtgattctttaatacggtaaacaatttgaccactatcattaatcaaattacagcctgataaagcccgaataacagtatagcggcgtcctttacgataatcgcgcttaggttgctctttgggcttcattgcttcttcaaaaattttcttgttaacagcttctttagttgtcttagatttttgaattgcctgatccaatttacccaaaacattgccatagcgcttgccaacgcctggaacaaacgtcaacttgtgtaaagcatcaagtgaactctttttagctttttcatcacctggagtctcaattaaggctgtcagcccaatcaataattgcttaatttgctttaaatctgcatttctttgtgcaattgattgtgtatttgcaattttattcttaggttgagttactgatttagtctcagatttttcagctgtattatcttcggccatatttaggatagctttaatcgcacttaaactattttcgagacttttatcatcagcctcagttttatttaaaattattttgatattatttcgataatcatacattattctcaccacttttattgtataacttactaatagtaacgaacataattatactgatttttatgaagtagtgttaattgattgatcgttttagtgattaaatttttttacgcaaaagtgtctgggaaaaaactagcttccagatgaataaaaacgatcaagatttccttttttaagaatcttgatcgtttttttgttctctttaaaatttttaacaataaaaatcggcccttcagccaccttctttgacaatatttgttcaaattcatcatcataaaggcaattccgatatcggtttcgaccttctctttacctcgcaggtgcgttctgcgcatgccaaatacgttcttcaaatgtccgaaaactggctctacatcatattttctcatgccatagatgtgtctgccttcttcgctttggagaacttcttttgctttttcttttaaatattgccagttaggattatagcgaacttggcgctggcggccgctagctgttttagccaattgttccaattctggcgttagctggaactcgtctgcctcataaaccttaaaatcacggacctgaccagtagaacgatccttgcgctggctgtaatatttgaaattgaatctgacgccatgatgatcaatgtaataatcatctttttcattgtagtaccagttgattagcttagttggatcattcttatactttttggtctgttctttttcatacatagtgtagggaataaagtacttcttgtctggatatttttcctccagcatcgaataattgtattcactgccatagccagcatcggcgacgattttgtcaaacttgtccaacacggtcatttgatccaaaaccggctccaaagttttgaaatctgtcggattaggaaagatggcataatcaactacatattgatcggtcgtgactgcttgaatattgtagccaggctttaattgaccatttttcatgtggtcttccttcatatgcataaaggtggcgtcatgatctgttttggaataactgttgcgtccggcaaagatctcttcggcttcttcatatttttgcattcttggcacataatcttttcttagccggtgcagaatcttttttagtccacgtcgcttggcttttcgaggtgaaccgccaggaatggctttgttttcctgctcaatctctttagtcagcttgttaatttctgcttcagtttcttgagctaattcctttagcccctgactagtttgaactttttctttttccatttctttgactacttctttagtaatcaattcatcataaagttcaactgcctggcctttcagcttttcatgatacttttcaaccgctttgcgccagacaaatgtatagcggttagcatcagcttcaatcttagtaccatcgataaaagcagcaccttcattgattaagccttcatcttctaacaggttagtgaagtagataaagctctttttaatcagttcattggcatggctgcttgatctaaaattattgatagtatgatatgaaatcttttgctggtcagccaagatcatcattggcagattttcttccagcatcaactcaatctttctgccagaaaaaactcttctggagtaagcaaaaagcagtattttgagcatcatggctggatgataggctgggcggccctttttagcagtcttgcctactaaaacatcttctggaattgaatctacaaaccagctgatgacattagccaaatgattggccggaatggcaaaatctagattaagtgttaaagcagtttgacctgtgatataattcttgtacatgttagtttccacctttttgtttttattttgtgatgatttaataatatcaaggctggagctaaaagtatacaaaaagagcgttgaaacaaaaattcaacgttcttttttcatgatctgagacttagttttttcccagacactcctaatttttctatttatcgagttctaagccaattgaaccaattagcgaaattttcacctgctgtaacacgatgaaccaatacaatacctactgcttttaccggctgactttgcgcagcagcaattggaaatgcagtagagagagcaacagtcagtgcagttgcagaaattgcaattttcttttttaaattcatttcaaatcctcctcgtaaatatctagacatcaacatcattatattacgtgggattctaaataaataattcatttatgcacacatagctttaaggctctaatacaagtttatatatttaactatataaaaaggcgactcacaatcgagtcgccttttactacaatttctaattattaagctctccactcgccgccttggccataagtatgcttacctaattcgttgataattacatgaatgtgttccttaggcgcaccagtattcttgtgcactgcttcagtaacatccttcattaagttagtaatctgctcatctgagcgacctttaattaattcaatatgtacaaatggcataatttagccctccttttttagtttaattatagtataaaaatttctcactaaaaagcaccaccgccgctgccaccaccaaagccgccagacgatccacctgaaaatccacctgagcttccggaaactgaagataaaccagtagacacgcctgaagagaagctacgttcaaaactatgctcaaaactgtcactactgctactatagaatccactataaaacagaactggtgcagcatctaattcatctgcaaattcaatcttaagctgcttcaatacctttttggatagaccaaacgctacagcatacggcataatgtcttcccataaaatcagatcaccgacgtctttcatcttgaattgaccaatatcgtctagcattttcttaaagcagcgaacttgatctgtctcaagtgcacctttttgggtataaatacttaaacgagaattgcccactatgaatgcagcaacttctaagacgatcatcatgattccaattattatcacaaaactgggtatattatttgccatcattaagctaattacccagatcgcaaagctagcaatcattcccatgagcatccccgttcggaagttgctacgctgctttttatattttttatcaagcaagtccttatcctcaacttgcttatattgcccgtcacaccatttatcaaaacgcctacccaattttttagaagtataatcccgcaaatctttcgttgtaaatgacttaccatcaccaactttgttaaaaataaaatctaataggtcatcagtcaaaacactatcatctactaaagtaattcgataattagtccgctttaaatgtttagtttgatatttttcgatcttaattttatttttaccggctaattgcatcaaataagctgtaaatgctttaacatttggtttatcagcttcatccaaaatttgcgcagcagtaggtgatatatctggaatttcataattatgtactaaatcgcgctctatttttggcttaaccccaacttttttaataaaaaagcctctaattatcaccacaaaaccgacaagtactgaaatgatcatcaatcctatactaagcatctgcttacgctgacgcttctgattagcttcttttgctaatgctgcttcttgtttttcaattgctcttttcttattttctttaacaatattctgattagcactagttaccgtagttggaaaaatcgcatgtacttcgacaccactatctcctgcaacatcatcagcagtcataataattttgccctcttttggcaaaacctgagtgtaaccacttagtggcccatgagcccaagcttttagccccttaactgccccaggaaaaatcacttcagcacgcacatgatctaagtcagtatcccaaccattaccaactattttaaagttcagctcagctgtatcaagataattagtaattgcccggtgaattagataagaatactcaactttaaccttatcattttccttaattcgatgataaaccttaaaattataagaattgccctgcttttgcaatttatacgtattatttttgcccgttgttgcggcctttatattttgtccatcgaccttaacctgaatgttgctcaacttctgttttacagccagattttgcttataataaaggccacgagcatcactatcaaatgaatacttaattgttcgatacattgtcagtgaaccatctttattaactcttgctatggctctaacattatcaatatcataatcaacatcagctctaacgctttgaccccaaatagcaaaaacgctcaataggcttaataaagccaataaaccaaggtatttcttcttcattatttatttcccatttttctgcaaaaatttatcaattaaagtatctgctcgactatgatatttacctttaaaatcatgacctgcacccttaaataagtataatttcgagtgcttaaattttttattagccataattgaataagaatctggaataatcatgtcacttgtaccatgcattattaaaactggaccatgatacttagttgcttcttttaacaagttatacttgaacaagttttcaaaataggccttaccaattgtgaagccaaataggttgagcttgtctggcacttgtttttctgatttaaaagccgctttcgcataatcagtgatcgaaaaggcagggtaaagcaaaatcaatgactttacttcttgcggatatttacttgcgagcattgcggcaactgctccaccttgactctcgcctagcaaagacacttgtttacggtcaacatcagtcctatttttaattgtatttaataccagctgtagattcttttcttctgtaaaaattgacatctttaattgatctacaccactactttgaccattcttagctccaccaggaaaatcaaaagtataggcaacatagccacaactagctaaatatttagcataactggttagatcacggtaatttcctgccaatccgtgagccaaaattactgctttcttcttaccagctaaaccctgtggtagatatatatgaccataaatatcaacgccatcttgttgaattcgcaaaacttggtctatcacttgatacttagcctgtttttccttagattgctgtttatcgactttaaccgttttaactgacgacttagccttcttaggcgtagtactttttatagtacaacccgttaaagtcagtagcatcaatattattgctataaatctttttttcaagtttatttcatccctatcagttaattaattcaggcgtttcctgaatacttttaattatacaaaaaacggcatgaaaaaaggaattaaacctttaagcttaattccttcttgataaattcaattttttaattaaaagttagccgccttaacgtacatgttacgtccgattcggtaacagcttttaccattaacgcgcatccgtgaaccataggtcttaattggcgtaccttttctaagcactctccagttagcgcggtttcccttgttattatatacataagcattgtgcttaagtacacgtgaattacctaaaacattacttgccataatgtaacgaccattgcccatgtttaaggcagtcttaccattatcaagagtcactacaccataatgagtaatattagtataagctgcatagtagccgctttgacgctcactctttttattatagatatatgatttcttcatcacatagccagcagttgctgaacccttatcatcatctgatgaagtactcttattcgaagtatttgatgaagcatttgaagagctagcagaattggtgttgctggtagctggagcttgtgaaattgcgccattgttggaagttacattaccgtcaattgataatggtaaaacagcaatatttccatcaacgcttaatcccttccaattatcagtaaattgccaaattgaaacgccattcattgatgggaagtaattgaagtttggactatcaattctacctgaaatagcgtatgaagcgacccacaatgagttaggatacttggcaattacactattagtatcaatattattttgtaaaactgatgaactagcataaagaagtggcttatagcctgcattttttatagtgtccataaaagcaataattgcattagccgttggcgttttaccaccgtaaatgttattgcccgaacctgtttcataatcacaagcaatatatgaacctttaggtaagccgaatgcttgggcagcttgaactgcataatttgcttctgcagcagcagcacttgcatttgaactaaaagtagcaaagtgatatgccattggcatcatattatttgataaagccgttgaaatttgacttgatgccttagggttacgataggaagtaccttcgctaactttaacaattgcaaattgtgctccagcttgcgcatgacttgacaagtcagcgttttgataactagcaacatcaactccaagtgcgcgggctgcaacagaggtagttgcagcgttcacaactgcagtttgtggtatatttacttgtgtcagcgctacccctgccgtaccaagaacagtcgcgcatgccaatctaacaatgatttttttggttgtagtcaatcttaattcctccgataatgttaaaaatagttgtcgttcacacttgtcgatcctattttttggaaatcaattttagaataagctcgttccaaactttagtcaactgattcactaataatgtaagattaagttaataattgtcatatatttgtatcatacaatatcaaatgtaaaaaaatattgtctttgtagtaaaatttagcacatagatacctaaggtatgtaaaaagcctgtaagaccaatgcttacaggcataatttatgatccgggtgagattcgaacccacgacccacagtttagaagactgttgctctatccagctgagctaccagaccatcttgtatgtttgtacgtcctcaacagaacatagactattatagggaaacgttaattaaaatgcaagaggatttttcaaaaaagtttttattttttcaaattcaattaaagtataattgagttaacatagataattattagaaaagagaacaattatggaacttaaagataaaatcaaaaagtttgttactgactttagagatggtgcatatcagcatgacaccaaacgtgacagtggcttgcctcacgacatccctgaagttgaacgtcttgataatctgccttatggtccagatgaaaagtggcatactttagatgtttatttacccaaaaagcacgaagctcccttccctgtcatcatcaatattcacggcggtggttgggtttatggtactaaagaaatctaccaatattatggaatgggtttagctaagcgcggttttgctttcatcaatcccaactatcgtcttgcaccagaaaacgcggaattccctgatgaattagacgatgttgatcgctacatgcattgggttgatgagcacgctgaagaatatcgtctagatcgcaacaacgtttttatcgttggcgacagcgccggtggtcaaatggctgagcagtatgtcactattttgactaatccagattatgccaagttattttcttacaaaccattgaacttaaaatttagggctgtcggcttgaattgtgctgcttccttcatgttaaccccaagcaatttagatggcatggctagcgcctacttcactaaaaatgcagttaacaagtatcatgaacaactcgatgttgaaaaatatatcaatcataatttcctaccaacttttttgattactgccaacaaagatttcttacatgacatgcaatttaccctgtttggcttcttactcggccgcggcgttcatgctatttgcaaatcttatggcgatgaggaaaatccacgtggtcatgttttctttgttgatcaaaaagatgaattagctgacatcgcaaatgatgaagaaattgaattttttagaaaatttttacaaaaataaggacggaaaataatgattaaattttatggttataaacgttgctctacctcacgtaaagcacgcaagtggatggatgaccatcaggtcaactacgaatttcaagatttagttgaacagccaccaaaaaaagaagacttggtaaaatggatgaccaaatatcaagatcgtggtctaaaatatttcttcaatacacacggtcaagattaccgcagagaaaatttgaaagaaaaagtgccaacaatgacgattgaagaagctgcagatatgatgtcaaaaaatggtaagttaatcaagcggccattagtcgttgatgacagtaatttaacttgcggttttaaagaagatattttcgaacaaatttggctataataaaacaagcccataacctgtaactttgtggttatgagcttgtttttatttctttaaatgaatttcacgatcaaacaattgatgcatttcttgattaaagttgtgagcaatgaatacaatcgttgcatccgtcttagtcaactgacgcaaaattttcatcgtagccgcctgatcaattgcacttgttgcctcatcaatcaaaatcaacttactctggtgtaccatgcttctagctaaaacaattttctgcctctgaccaccagaaacattcaattgatcaaggccaatcttagtctcaatgccggccgaaaacttagcaatatctcctgcaaattgaactttttcaatggctgatttaactcgacttagcaattttgaattgaacatcgtaatattttcaacaatcgttactgggaataacactggatcttgcggcaaatagccaatttcagctaaatcaggttgaatcttttcacccttttgattaaagtattgaatcttgccgcgactggcttgcaattcacctaaaatcaatttgagtaaagttgattttcctgtacctgaatcacctgttagtaaaattttctctccagctttaacttggaaatctgggaaagtcacggcctcaccgtttctaaaatcgatagctaaattatggattgaaaaactaaccgcttgttctaaattacttttctgttcagactgaattttctttttagctacaaaaatctcttctcgcaatttctttgttgctcgcattcttccaccataattagcaactccttgcaaagaaccaaatagtgctccattgaagttgccaatgctggcaatcaaaccaaaagcagcccaattatttactaccaaaaatccagttaaaagaaagattagcacatctcctaatgaataagccaattgattcagataatctaattcctgatctactttttccttctcaatatttgctgcttccaagcgtcctgaattttcagcaatagtcttaaaaagcttatcgctagccaaatagcgacgaacttctgataagccaattaaccaatcacctaaagtcttcaaatactttcgattagctactgataccttttcagtagctttttgtaatggcttatccagtaatttaggtaaataaatctgaattgcggcaaaaattaaacaagcaactaacaaactccactgaaaagtcaccaagctaaaggctacaccgacaataccggctagcatccctactatatagcggaacgaatctaaatagtcattatgtaacagtttcaaatcattagtcatccgattttgcactgcactaaccgcatgcttttgactatcggcaaaataatgatctgttagttcttgccgaattaaatgcaggtaattttgaatcaacttttgccaaatgattcccgccaaattatagaataagaataccatgacatagctagacagctggattaatgtccaagttaaaaataaactcaagtttctatttttggcagcatcaaattgcaaagttaacacataagctacaactacttcgccaactgctgcaataatctgtagtcccatagccagacagaatttaattggattaagtttaaataattctttgctactcattattttccctccaagtgaacttcacgatcaaacaatgctcgttgttctacggttaaattgtgtgcaacggccaaaattgttgctctactttgcattaagttttggaagatttttgtcgttgcttgttgatcaattgcactagttgcttcatctaagtacagaatcggcttctcatgcaacaacgcccgcattaaaactaccttttgtttctgtccaccagacagcaattcctgttgtggatcaagctgtgtctctatcccatttttcaaacgcgcttgatcactatcaaaaaccgtcttatgaatcacttgtacagtttttttattaagcttaggcttaaacatagtaatattttcttgaatactgccaggaaagatcaataagtcctgtgccaaataacctaattgacgtaaatcaggtttgatcttttttcctgttttatcgcaatagattacttcacccgtacttggcttaatttgccctaacaaaacttttaataaagttgattttcctgtacctgaatcaccagtcaataaaaccttttcaccattcttcagttcaaagtcaggataagtaattctttcaccatttggatattgtactgacaagctttttatttgaacggtagcgatttgttttaaagaatcataccctttttctggtaaacacttttgcaatttagccagatcatcccgcaaagttttcgttgattttaattgcgtatatctgttcacgcaactatctacactataaaaaattccattggcaaaatatcccgctgtcagaatcgctcctaaatttacctgatgattgaaaaacaaaattccagcaataaatggaacaccaacacgaccagctatattaaatatcgcagacactaagctagtataatgtagcaatttatctcgctgatattcactctgctctagtttctgactctgttgtcccaccacctttttcaaaacaactttattctggtagcgtcgcagctcatctaaacccttgaaccatttttctaacaactgcaaaaattgcttattttggatagaaacagctttagttgctcgattggtatatttttcagtcaatttcggcactactactgcaagcaaagtaactaataatgtatagacaaccaatatccaatgaaaggtaaacagcgtaccaatagttaaaataatataaattaagtcacaaacaaaatagaagtaaacattatagtaactctcttgcactaactgcaagtcatttcccaaatgattttccatctctgagactttgtcttcaggctgctgataataatgtcgtataattcgctgtcttacctgatgaaaaagtgtctgtgtttggttggtattttgtaaacttccccaattaaaactgacattgcagacctgtccaattaaaaattgtacaaagattaattccaaaaacagttcgaatttaccacttgcaattgcatttaactgcggactagttaagtaggtgtacattgtagttgtcagttgcgttagcgtaatcaaaaacagaactaacattgcccgctgacggttagctttaatataatctcttaaacccattattttcctcattcttttttgacaaaaacgtataatcagcaaaaaaatctctaacatgatttatcgcaaagaaaaagcactgttctggatgctcacatcctattaacagtgcaacaaataaaggttgatttcgataaagaaaaccaccctcaattcatctactgctaatacttggtatgcaagcaaaaaatgggtgcactaaacaaggtgcaaagacagtattttgctaaacaacaaatcaaatattagagattcagtaaacgaatcatatggcaatttcctctatttctataagttaattaaaactatatcatattaatttaattttacaagctattttttatcttcagctaaatatttttgcaaaactttgaaaacaccgttctccgtattggccggtgcaatatatttcgcctgcttttttaccttgtccataccgtttgccattgcataagaatatttggcaaatttcaacatatcgatgtcattacccccatcgccaaaggcaatcaggtcatccccatcttttctaggagatgctttaatccggcgcctttattaacaccttgtgtgttaacatcaatggcaaaagtagcggaagcaaaagcagaaatctggttatcgtgcttagaattaaaatctcgttcaatttctgcagccttagaactgtccattccaaatgtgatctgataaatcttatctggtaagtcattccagtcattaattacagtgctattaccagcaaagtaagccaaaaagtcgcgttcatctttttcaacattgctatgcaaatatgcaatatctcggccaaaaaccatcgtagccatttcaccatatttcacatgtacatcatgaattagctttaaaacgtcatcgcgattaagcaaataactgccagcttcttgacccttgatgattaatctcgagccattcaaagttacgaaatccattctgctggcaaacttgccaaagtcctgcttcaatctaacataaggacgccctgaagccacgataaaatgtactcctcgttgttcaaattcagtcaaaatttgatcaaattccttgtgattaaactgcttacgatcatctaaaaacgtgccgtccatatctacagcaactgccttaaatggtaaagtcattttttcaccccatcattattctattttttccaaaaataatcttatcatttttgagcatcctatttcatccgtaatctgcgtaatctaccacgttttagtacaaaatagctaattgttaatagaacagtgctggtaagaagaaaaataaaattatcactccaaaaataatgccaacctatttttgttaaaatatctggcgttaaaatttcttctactgttgcatagatataaaaaacagcaaaaaccgatgcaattaaatagcctactccagctaatgagtaaaaaattatgctaatccattttttagtcaccataactcggtttcctagccaaacgaataaaatagccgtcactaatggcaaaacataataataccagaatcccataactatccccctgattaattttggctcattatcacatgcaaaagtaaaaaaacggtaaagaagactttaattttgggcaaaaaaagaccagctcacttcagagctagtcttatctattctattaaactaacttaacgtgcttagcatgcctgttcttgagcttagcccaaccatcgaaaaacaatgccccaaaaagcaaaatcataataattcctgccaaaataatggcattagtcgaattagcaactgctaaactttgggctgaatcaaaatcagcaacttcgtccatttggataatcaatcctgaaaacaacatggctaagccgttcaatgttagcaagccacacagaattgttaagattttagtctttaatagcttcataaaaccatgccctttctttattaattagatgaatattatacacgcattattttataattcaagtaattggattaagaaaaggcacaaaaaatagacatacgttcgcatgcctattactaactttatttattccacaggaatttgattaatactttatctacttttggattctcatgcaacttggagtgacgtgcattttttccagtaaacttcactacctgatagcttttagcacgatctgccactaaatactttaatgacaaagatgatacattgggtactgttccatcggtttgaccaccaatatcaccaatgatgtttaaaacacgaactttatttttcggatatgtttctcttacacccgtcatttgccaatagctagaattcattttgttcggttttccggcagaattcaattttaaacctttaggttgacgaattgaggcgggaacacggctaaagttcaaaccagcaaaatgtcctgccatgccgacttgcttgactaattgtggcatcttccggttacgtccattttgcagcatataataaatgatcgaaatatttcctaaagaatgaccgaccatgctcattttttaataccataacgcttttgcagagccttcactacattagtggcgtaaacaccatgtcgagaaaagttcaactcacggttattttcataattgacttctgcaattggatttttggcaccttttttccaacttccactcaaagaaaccttaccgttaggcgccacctcagctctaatcactgagttcgtgactccagctttctcagctgctgccaccatgtgttcttcagtatgatatgacgaaccacaccgtggaaaaataatgtcggtgttgaggtgattttagtctgacttttagtatgatcaaccttattctgattagtacaagctgtcagcgaaattgtaaatatcgttgtaagtagcaagacaagtgaaaacttttttctcatttagcatcccccatttgtttaagttcattttaaagaaaagaataccaaaataaaaatatttttcgcttattaacttccatatctattggttatagccacaattaaaagtaaaatagaaagtaattaaactgcaaaggagaaaaatatgaaatataaccaatacgcttatgtcgaaactgacttcgatcaacaagtaaaagaattaatcgacatcaatttcttacctaaaaattatgcagactggaattttaacgatttgctgggcaagctcgttaaaatgacaattgctgaagcaaaaactgacgctgctaagacaacaaaattatctgaatttgctgtttcaaatgagcaaactttagctgactttttaaaaggaaagcctgaatcaattggtactgctcaattctataatgtagccttacaattacttggctatcatgttcattatgactacgaattagccgatccaaccggctttatgcaaaagaatgctttaccttttatccaagacatttctgatgtcaaaaagttaatctctgctttttatcgtttgctcaatactcgcgccaaaaacggtcaaattttgctcgatgtaatggctagtaaggggtactttactcaattcgggggacaaaataagtttaaatttttcaatggcaaagctattcctgtcttcgataccaacaaagtaattcgtgaagttgtttacgttgaaactgatcttgatactgatcatgatggtaagagtgacttgattcaagttactgttttccgaccagctgaaactaacaaaggcttaaaagtgcctgccctttatactgcttcaccatatttcggcggaattatcgctaatgaaaagcgtaaccataatgttgatgaaaatttatctgatgccgccgattggaatgatccacaatatgttcattcaccaatagttaaagcaaagcagccagacgactctaaccacccagctaccgaagaagcagtacataaatcttcttatccattaaatgagtatatgcttgctcgtggttttgccagtgtttttgctggagcaatcggtacccgtggtagtgacggggttcgtattactggtgcacctgaagaaactgaatcagctgctgcagttatcgaatggctccacggcgatcgtattgcttacactgaccgtactagatctgttcaaaccaaagctgactggtgcaatggcaatatcgggatgactggtcgttcatatttaggcactttgcaaattgctattgccactactggggttaaaggtttgaaaactgtggtttctgaagctgctatttcttcttggtatgactattaccgtgaacacggtttggtaatcgcacccgaagcctgccaaggtgaagaccttgatttactggctgaaacttgtcaatcaaacttgtgggatgcaggttcttacttgaagatcaaaccggaatacgacaagatgcaaaaagagcttttaacaaaagaagaccgtgaaaccggtcaatattccaacttttgggaagcaagaaactaccgccatcacgctgacggcatcaaatgttcttggatttctgttcacggtttaaatgactggaacgttaagccaaagaatgtttataaaatttggcaactagtcaaaaaaatgccaatgaagcatcatcttttcctacaccaaggtcctcactacaatatgaacaactttgtttctattgattttactgacttgatgaacctttggtttgtacatgaattactagggattgaaaacaatgcttacaagcaatggccaaccgtcatgatccaggacaacttgcaagctgacaagtggcacgaagaaaaggattggtcaaatgaattaggtcaaaagaagacctactacccaactgatgacggcgagcttttccaagatggcaatggcaaagcacaacaatcatttgtcgatgaaggtggcattgaatttaagaaggctgacatctcagaaagcgactggctatacaagttcatctgtggtgatgaaaaatgggctaaaccaagtttgcgttttgaaacagacgaatttattcacccaactacgattgtcggtcgtcctgaagtaaaagttagagttaaaggcagcttacctaagggacaaatttctgttgctttagttgaattgggagaaagaagacgcttaaccgctacacctaagttcttaatgcgcggcggtcaagaacttggctatagatttggcactgatactttgcaagaatttgtgccggacaagaagactaaggctaagttgatcactaagggtcacatgaacttacaaaactataaggacatgaaaagacctgagaagattgatgctgacaagttctacgatttagacttcttgcttcaacctacctactacactcttccatctggtagtaagttggccttgatcatctactcaactgatgaaggaatgactaaacgaccacttgaagaagaaacttatacagttgatttggccaatactgaaattaagttctatgagaaataatttttaatatataaactaatacggcagatatttattttaagtatctgccgtattttttattcaaatattttcttatattcaccatagccagactgttccaactgatcatatggaataaatctcaatgctgcggaattaatgcagtaacgtaaaccaccttgatccactgggccgtcagtaaaaacatgacctaagtgagaatcagcttcgggacttttaacttctgttctctccattccgtgcgattgatcgcggtggtaagttaatttcttaattggcttagtaaaactaggccaaccacagcctgcattatacttatctaagcttgaaaaaagtggctcacctgacactacatcaacgtaaatccccttttcataaaaatcatcatattttccggtaaaaggatattctgtagcggccttttgagttacgttatattcctcatcagttagccgctttaaagcttgctctttttcttctttgttaaaagtcatcggatcattcctttgctaaatatgttcagtagtacttggaaagaaattatctattttcttttcataaatatccaatttatattttgtcaaaaattgatttgatggatcatatattctaacctgaagcatctcatttttgccattcatatgcacttctttatttgaaacttccaaaaatagcttaaatgcagcaatcagattttgataagaactataaacatgcacattatgttcgacaatttctccattacgtgcataccgacgaccgtcgatcacgtatactgtattatcactcatagaaatcatcctctctttggcttctacttatattttgattcattttatatttattcatgatttttttactcaaaaactccaacaattatcatgttggagttcattcaatatttatttaaaattcattaaaatactgaggtcaaaactgcaccggcaacaattaatattaaaccgatcacagtataaataagacctttttgtgtcttcttttcgtgtaagaaaaggataccaccaagagtagaaataacaacacaaagttgtgacataacaaaggctaggtttacaccgttcatcttaactgaaacaatgtatgcaagagcagcaattgcgtaaatcacaccggcaggaattacttgataactttctttttccttaaagacttgtgtttgcttagttgcaattaaataaacaattgctgcaaccaacattccaatggtttcagcaaagaaaatcattacgctgtcacccttcaaggcctttggaatggaacttgaagtaatgtaaccaagtgtagtcaataccagcacaatcattgtagtggtctgattcttttttccaccctcagatgtacctttgtcagtcaatgatgtaaatgctacaccaataattaaagctaagatccctaaaaatccaaacaatttagcttgagtgcttgcccattcactaaagatcaacacacctacaagtggcacaccgatcaactgcaaaccagttgaaattggcatagtttcagaaaccccaaccttggaataactgtaatactgaccaacttgaccaataacccaagcagcaccagctaacattgctaaaataaaagtagtcgcattaaaagatggacgcttaatgagagtaactgcagcaccaaagataaatgcaccaagaacggtacctaaaatttggtggtaaacgttactcttcttgacaccagcaacaaacatgggcataagaccccatcctattgccggaataaacagaaataaataactcattcgttttgtctcccttattaatgtaaaaaagttacaaaaagcattctatcaacgaaagcgcttttaatgcaagcgatttactattaatggatgacaagtgcaaatcaatatatatcagaacaccaagagttatttaaattatttttataaaaatcctacggcaaagcctattccatataggaatacgcgtggtgctagttaaatcgttttagttaataaaaaagtccaatcttgttagactcgacttgtaaatagtaataatagaaaagagtctgatctgattgaactgccttaagcttaagcgttttagccaccatttacaagttagttttaaagatttagtgataatttgtcggcactggtatcgtttgtatgcaccggctgagtttactcatcggcgaaatattgatcaaattaaaactacggacagtctgattttggctttacttatctggcaagctaagacaggaattgaatcacaaagaagattctgtgaatgtttcaattgtttatcacactcacgttttaatcggcgttcacgtcagctattgcaattgatttatcagatacggcaagaaatgaataaaaaggttgacctgaatggacagttcttgatcattgacagctttccggtacctgtttgccaaccaattcgaaactatcgtgctaaaatttttcgcggttatgccaacattggttataaggccaccaagaaaatttacttctatggtttcaaagttcatgccattgttagcgatgacggttacattcttgattatgtcgtaacaaaggcatcagttcatgatgccagggagacagttgaactgatagaaaatacccatccatctaattactatcttcttggcgacgaaggctatttaggcaaagaactgcatcaacagctaaaacaaatgggttacgaactttggacaccatatcgtaaaaatatgacaggagctaaaaagcacaatgatcatcaattgatggctattcgcagaacaattgaaagcgacttttcgcttctgacctattacaatgccgagaacaatcgagcacgtagtctgataggctttcaaagccggttggaaattgcaattttagcttataatttggcttattgtctagaacgatttaactagcaccacgcgtataataattaataatgcaagttgtaaagtaataacaaatgataatggagtaacgggcaaattagttacgtcactcagtgtaatcactggtaatccaattgcaccaaaggcagttggtgtagtattagcaattaaacaaattacggcggcattaatcggattaagaccaaatccaattaatatcccagcgggaattgcaactgctgtcccaaaacctgcaattgcttctaagaatccgccaaatccccatgcgataatcaaaactaaaatacgctgatcagtagtgattgacgacaaagtatcttgaataattttaattccacctgaataattgcttacattataagtaaacagtgcagccacgattacataaacaattggccatagccccatcagaatgccctctaaagcacccgtcaaagtgtcaactatagagaggttaaatcccagtatagccaatacgatagtaattaatagtccaatgctgcatgctttaatagcaggcatttttcgaattgccaaagagtaaataagccaaataattggaattaaagccaataaaaacgaaatccacatttttatttccccctaaacacttcacttccttatctcagattataaatgtattcgcttacaaaagatagtgaaatactcttactcatggctctatactaaagtttgtgatacatatttttttcacaatatcttgattgaatgctatctatcgtttatttatctcagaattattagctcacttgtgaaaattattttttgcataaaaaataatgcattctcctacttcaatagagaaatgcattatttttatctattcaactatcctacttcaaagcatcagtagcaaatgatctattctccaagctagtaagcaaagcatctgcagtatcaagtgctgtaatcaatggtacattttgaccaatggcaacctgtctaatgatgaagccatcagaattcttttcaatatcgtgacccatcgtattgataaccaagtcaatcttgccatttcttaattcattcaagatattatccttggcgtcttcatcttcatgcactttagttactggatcaacatgcaaatcatgactgcgcaagaaatcagctgtacccttagtagcaaagattctgtagccaatccgcgcaaatctcttggcaattggtaaaatcttttctttgtctcgatcttcgatggtaagtaatacattaccattttcaggcaattgcatcttagcacctgcaaaagctttgtagagagctttggcaaaagtgtgatcactccccattacttcacctgtcgatttcatttctggcccgagatatgcatcaacgtccgataatttgctgaaggagaagactggtgctttaacagagatcatgtctggctctggggcaagaccatcaccgtagccctgttcagccaaactttcgcccataattactcgggtagcgacctgagccatttcaatacccgtgatcttgcttaaaaatggcactgttctacttgcccgagggttaacttcaattacgtaaacttcaccatctctgacaatgaattgaatgttcataatgccgacacagttcaacgtcaaagcaagctttctagtgacatcagtaatcttttctttaacttcatcagagaaggtttgtggtggataaacagccattgagtcaccagagtggacaccggcatgctcaatatgttccatgattcctggcaaaagaacttccttaccatcactaattgcatcaacatcacattcacgaccatcaagataatcatcaaccaagattgggtggtctgctgcaatatcaacgtggtcttgcaagtattcttctaactctgccttggtgtagacaatttccatcgccttaccacccaaaacataacttggacggactaaaactggatagcctagcttatcagcagcttcaagtacgccttcatgagtagttgcagttaaaccttgaggctgattcaaatgaagttgcttaatgatttgatcaaacagttcacggtcttctgcacggttaacatcagctactttagtgcctaaaatcttgacgccatgttcttctaagccatgagccaaattgattgaggtttgaccaccaaattgaacaatcacgccttctggcttttccaagtcgcagacattcaagacatcttccaaagttaatggttcaaagtataatttatctgagatagagaagtcagttgaaacagtttcaggattagaattgataacaattgcttcgtagcccatcttttgcaaggccttgacacagtgaacagtcgcataatcgaattcaacaccttgaccgattctgattggacctgagccaataacgatcaccgacttcttaccagtcttatgtgattcattttcagcatcataagttgaataaaagtatggtgtctttgattcaaactcagcagcacatgtatcaaccatcttgtagactgggatgatgccatgctttttccgaaatgctcttacctcatctgcagtttcattccacaaagaggcaatcgttggatcactaaagccatatttcttagctaagcgcaatacatcaacatcatctttattttcctcaagtgtcttttccaattcaaccatatgttgcacgatatctaaaaagtagaaattaatcttcgttaattcatgaacatcttcagctgaataaccacgtctaaatgcctcagctaaatagaagagacgatcatcttgagctttgactaatttttgctctaattggtcatcactagctacgtgtgcttctggtgagtaaagatctttttcatcaatttctagtgatcttaccgctttttgcatagcttcttctgcagtacggccaattgccataacttcaccggttgctttcatttgggtgcccaaaacgcgatcagccttagggaacttatcaaatggccagcgtggtatcttgcagactacatagtctaatgcaggttcaaattctgcataggttgttcccgttactgggttcttaatttcatccaaagtcattcctactgcaattttagcagccatcttagcaattggataaccagttgccttagaagctaaagcagatgatcttgaaacacgcggatttacttcaattacatcataattaaagctatttgggtcaagagcaagttgaacgttgcatcccccttcaattttcaaagccctaatcaaacgcagtgaacaatcacgaagcatctgatattccttatcagataaagtttgacttggtgaaaagacaattgaatcaccagtgtgaatccctaccggatcaaagttttccatgcagcagacaatcattgcattgtcatcatggtcgcgcattacttcaaattctacttctttatagcccgcaattgatttttcaatcaaacattcagttacaggggaaagttccaatccatttttggcaatctctgctaattcttcatgattattacagataccaccaccggtaccacccatcgtaaaggcaggacgaacaatgatcggatagccaatctcatctccaaaagctaaggcatcttcgactgtattaactgtcttagaaggtggaactggttcacctaatgacttacataattccttaaatttttcacggtcttcggcttgttcaatagattgcagcttagtacctagaagctcgatgtgtaattcatccaaaattcctgttttggcaagttccatagccatgtttaagcccacttgaccgccaagtgttggcaaaatagcatcaggatattcttgacgaataattcgtgaaatcgattcaactgtcagaggttcaatgtacaccttatctgcaattgttgtatcagtcatgatcgtagctgggttggaattaactaaaactacttcatagccttcttcgcgcagagccaagcatgcctgtgtaccagaataatcaaattctgcagcttgaccaataataattggacctgagccaatcaccataatcttatgaatatctgttcttttaggcatgacgctcttcttcctttctctgatcaatcattgacataaagtcgtcgaataatgaaacctcatcatgaggacccggtgttgcatcagggtgaaattgcactgaaaatgcaggatatttcttatgacgtaacccttcaaccgtcccatcattgacttcaacgtgggtaatcattaagttatccttgtcaattgaatctgcagacacagcataaccatggttttgtgaagtaaaaccaatattaccagttgcaatctctcgtacagggtgattaaaaccgcggtgcccaaatttcatcttgtaagttttagccccattagctaaagcaaagacttggtgtcccatacaaattcccatcaaaggaacatgcttttctacttcacgcaccattttagttgcctctaccatttcttctggatcaccagggccgttactcaaaagaacaccatctggatgaaggtttaatacttcttgggcagtagctgtatatggtaaaacaatacaattacaatcacgttctgctagttcacgcaaaatactgtgtttaattccaaagtcgatgaccacaatattgcgtttcgaaccaggaactggatatggtgacttggttgatactcggctaattacaccttgagttacattcttagtctttaattctgccgcaattttttctgcattttcttttgaatctgcaatcttaccacgtaatgtaccgtgaactctcaattttttaactaattcacgcgtgtcaattccctgaatacctggaatgttcaaatgctccaaaaactttggtaatgttgtctgcattcgccaattatcaggatgacgggcaacctggtgacaaattacgcctttgatccttggctcaagtgactcataatctgccaaggtaataccatagtttccaattaaaggattagtgaaaaccaaaatctgatcggcataagattggtcggtaattgcttcttgataaccagtcatccctgttgtaaatacaacttcaccaactgtttcgcaatcagcgccaaaaccctcgccagcatagatgctaccatcttctaggattaaataccgcattattgttcatcccttctgtatacaacctgaccatcaaccatggtcattacagtttcaccatacaccttgtcgcccgtaaatggtgtattaacgccttttgacttatagtcttcttcttttaattcagtttcatggtctaagtcaaaaatcgcaatatcagctggcttacctggttcaagtaccccggcattttttaagccaaacgttttagctggtttatcggagagccatgataaaagctgctccaaggtgaagactttttcttctttgacaaatttagtatataaagtagaaaatgctgtttcactaccagtaataccaaaggctgcgcccttcatgccaccttctttttcattgcgagcatgaggagcatggtcagtcgcaattaaatcgattgtaccgtctagtagtcccactagtaacgccgcttgatcttccttatttctcaatggcggattcatcttataataaccgttgtccttaggaatatcgtcatctgttaataaaatatggtgtggcgctacttcacaggtaacattgattccacgcgccttagccattcgaaccagttccacactagttttagttgatacatggcaaatatgataatggacgcccgttttttgtgctaaaagcaagtctctagcaatttgcgttgtttctgctaattcagttactggcggcaagtttaattccttggctttaggtccttcattcacgatccctttattaaaaagcgaatcgtcttgtgcatgagtagcaatgatcaaattattttccttggctttttgcattgccaaatacatcgtttgagcagtttggactccatgaccatcattacttaaggcaaaagcaccagcctttttcaatgctgcataatcaggaatgacatcagtagtttcatcattagtgattggtccatattgaaaaatatgaaccacacctttttcattgttttcttgtaccattttttgcattagctcaggcgtattaggtacaggcgttacattaggcattgcccctaccatagtaaaaccaccatgagcagcggcttcactaccggttttaatatcttccttgtaagtttgtccgggatcacgataatgaacgtggacatcaaccagtccaggactaactagcttgccacttgcatcaatctctttatctgccgttaagttagtccctattgctttaatcttttgatcttcaattaaaacatctgctttaattagacgaccattttgataaactgtgccattcttaattactgttgccattattctaatcctccaagtcgtctaccgcgcaatactgcctcgatcattgccatacgcatgaacacaccattttgcatttgtctgacaaacatgcacttatcgctttcaactaaatcaccgctaagttcaacatcatggttaattggacccggatgcatgatgatggtgtcgggcttcaatgcactatagcgttgctgattaataccatatttttcgtgatatgctttagcattaaaagtcttttcattaggatcgcctgcatgacgttcatgttgaacccgtaagagcatcatcacgtccatatttgaaactaattgatcaatttcttcatacttaccatattgatcgaattctttatcataccagtaacttggacctgagaagtaaacttcagcgcccaacctagtcaaaagttccatgtcactttttgcaaccctagaattagtaatatcaccaacaattgcaacctttaagcctttaaagtggccaaaatgttcatgaatagtcatcatatcgagcatacattggctaggatgttgaccgctaccatctccagcgttaatcacaccaatatttaaatgttgatgttcttttaagttaatcaaatcattgtaatactcattctgtgagtgacgaatcacttctaagttgacacctaaggcgttcataattaatgaagtgtcatataaggtttcacccttattaacagacgaatgagccggatcaaaaggaataactgtcaaacctagttttctttcagccatttcaaagctcgtatgtgttctagatgaatcttcaaaaaacatattagttacataaactggcttagttaaacgtggtgttgcaccgccttttttgaagtactcagctctcctgattaaggcttctacttcattactatccaaattttcaacactcacaaaatgtggtaaattaacaagatttaaattttccattttctattctttctatacaaaaaagcctgaagcatttaattgctccaggcctagagtcttcccgtgtacacgaaaagaaatcaacccttctggccctctctggagtcaattaaatggttggatatttaactatcttctttttattttggtaaagccttcagttcaactgaatctttgccgtccttctcaattacattaacagcaacctgttcatcggcagaagttggaatatttttaccaacaaaatcagcacgaattggcaattcacggtgaccacgatcaactagcactgcgactctgattgaacttgggcgaccaacgtgcatcaaagcatccatcgccgctctgattgttcgtccagtatagataacatcatcaatcaaaacaacatgcttgtcatcaatattaacaccaacttgatcagaattgacaactggatcttgctttaaactagcatcatgacgatcatcccgatataaggtaatgtccaattcaccaactggtacatcaacgccttccaatttctgaatacggtcatgaattcgtttagccaagtaaacgcctcgcgttttaatccctaccaaaaccaaatcatcggttcctttattttgttcaatgatctcgtaagtaatacgggttaaagcacgcttcattgctagtgcatcccagatttcttttgccattatagcctcctaattctgcccatgaaaaaagctcccaatctcaactgagactaggagctttagtaaagtcgaaacttaagttaagcctgcctcgctagcctcacgggactaattttaaaggacattcattgctttaaagttactgtaattagaaacgtttgtcaagctctaattaaattttacttgaccaactaattcattgatatcttcaatgcctaatttttcaagttcttgcggcaaggcatctgcaatatgcttagaagcaatactatctttaaaatgagcagtaccaaccgctacggcattagcacctgctaacataaattccaccacatcttcggccgaagcaatgccacccatgccaataattggcaaagaagtaatttgacgcacttgactaatcattctaatagctattggcttaacagcctcacctgataaaccgcccatattatggcctaacagtggtctgcgttttttcacgtcaattcgcatccctagcaatgtattgatcatcgataagccatcggcaccacccttttcggcagctttagcaattacagtgatatcagtcacatttggtgttaacttcacataaattggaatattgacaactgctttaatttttctagtcaattcttcaaccacatcggcatgcacgccaaagctcattccaccttgggccacattaggacaagaaacattaatttctaaagcattaaccaagccggaatttgacagcttttgtgctacttcaacataatctgcttcactatcaccgccaacgctagccacgatcggtaattctggatattgctttttcaatggttctaacttttcactaatcaccttgttcacaccaggattagtaagaccaaccgaattcaaaaccccatcatctaaaacggcaatctgtggttgcggattacctgtggttgcatgtggcgtagttgtcttaataaccattgctccaagatcatttaagtcaaacttcttagctgcaggcacatcgccgaagccaaaagttccacttgctggcataactggatttttcaaatctaaacctggtaattttacatgtgtattaaccataattttcctccaaaatgaatgctcacggacactctttattttttcaagaaatgattctacacgtgattataattttttccaagcaaaaattttatttgtatttttacttttgaggtgttaaacttcaccttgatcaaactttaaacggtacagagagaccgcaagttcaaaatattgacttaaattatctaggaaaagtctatccttggtgtctctctgcgctaagatagactttttttgtggaggaaaaatgaaacctgtaattgttgcattagatattgacaatgaagagcaactgcataagattttgtctaaattaggcaaaccagaaaacgtctttatcaaagtcggtatggaattattctatcacgctggcaaccaagtggttaaagacttagctgagcaaggttataagattttcttggatctaaaattgcatgatatccctaataccgtttataacggggctaaacaattagctaagttaggaattacttttactaccgttcatgctttaggcggcagtcaaatgatcaaatcagctaaagacggtttaatcgcgggtacacctgttggcaaaagcgtgcctaagttactagcagtaaccgaattaacttcgatttctgatgaagtattggcacatgaacaaaattgcgcactgtcaatgaaagagcaagttctttcgctagcaaaaatagctaagcactctggagcagatggggttatttgttcaccacttgaagtaaaagaattacacgaaaaagttggcgatgactttttatatgtcacaccgggaattcggcctgctggcaatgctaaagacgatcaatctcgcgtggccacaccagcgcaagccaaagaatggggctcaagcgctattgttgttggacggccaattactttagccagtgacccagaagctgcatatgaagcaattaaaaaggagtttaactaaaatgcataaggatcaaattatcagtcaacttattcaagaaaaaattatcactatctcacctgacaaaccattcacttacgcaagtgggatgctttctccaatttacaccgaccttaggttaacggtttcatatccagaattacgcgatatgattgctggtgatttagctaatttaatcgccaaagaattccctgaggctactattattggtggcgtcgctaccgccggtattccccatgctgcatgggttgcagataaactacacttaccaatgatctatgttcgtcctaagccaaaggaccatggcaaaggccgccaaattgaaggccgcttcagtaaagatgataagatcgttttaatcgatgatttaatcaccactggtggttccgttttaaatgcagttaaagcaactgaaaaagatggcggcaacgtcattggcgtttcttcaattttcacctactacctaccggatgcaaaagaaaactttgctaaagctaatgttaaatatgctccgcttctttcctaccctgaattactcaaaaaggaaaatgagtcaggtcatatttctagcacgcaatatgatgtcttaaagacctggcacgaagatccatgggcttggggcaaacaattcgaaaaataattaagccaaaataaagaccagtttcagtttgaagctggtctttatttttttgttttaataccaagctggcttatcaccgtcggtatttggtttatttaaaccaacattaccacgactgtctttactttggtctttaactatttcatttacataactagccacacttagacgagagacctcagttcctttaaatggggtagttgcgccttcagttatttcatagtcaacttcatctttattggtcaaccaagctggacgaataatcgtgtaatccaaatcgctagcagtaatttgatcagcagctgcacgataagtggtcaaatatgaacctaaaatattcttgttccattcaccaaatttgcctggtacctcatcatagactcctaacgaggaaatccaaatcaaacgcttaataccatcttcatccatagctttaacaactgtcttagcttgatcttcaatatttgaaccagctaaattagcataaacgatatctgcacctttaatagccggagcaagttcatccaatttacttgcatcccctacgacaatcctttcacgttgatcatcgatatcttttttatccaatttattaggatggcgtaaaaataaaattaattcattatttttatcttccaaaaataaattttctgctaatttagcaatttgtccacttgcaccaagtactgcaattttagtcatttttctttcctcatttctatcaaaatttaacttacaattacatagtaaaacttatattttgtaagtcaacgatttaccacagataacctgtatacaagtttttagttttattagttgcaaataatataaaaaataaaaaagttgtaaaattatcttagttaggagaaccaaatgaatagaaactgtcaaatcttttgtgtaaatagttctttctcgtaaattgattttttaattatttatttaatcaaagtaggattctaaggtgtcctgaacctgaccaaagcctttatgaattcgattgaaataacggtcattgtagctcattgcctggatgccaataaatgcatcaagcgactgttcagttggaaattctgccttaggcttagctttacgcttgatgacgttgttaaaggattcaatcatattggttgaataaattgaagctctgatttgtttgggataattgtagaagactagcagatcgggctcaatttccttcaaacctttgatgacatggctataagctttattccatttggcatagaatttgtgcaagacagctgcagcttcttttttgcttgtctgttgatgtatctgcttgaattcgttcatgatcttttcacgatcgtcgacgcgtactttagcgcagatattgcgcatgacatgaaccaggcagcgttgaaaatgagctttaggataagtcctggccaaggctgttttcatgccaacaacaccatcagaaagaaaaagctcaacttgcttcaagcctctggacttcatgttttgaagcatctctgtccaaacttcaatgttctcactaggagcaatgcagtagtcaatgacttccttatgtccattaggtttaatgccaatggcaatatatactgcttcacgctcaaacgtttctcggcgcaaaggaaggtatgtcgcatccaaatagacacagaaaaacttgtcgcttagcttgcgcttgtgataagcctcaatcttggggagcatctgcttggaaatatttgatacttgagctggactataatgactgccatacattttctcaatcaagtcagcgatttctctggtagttacgcctttggagtatagcttgataatcgtgctttccaaaacatcagagtgctgcttgtagtcaggcagcgtgtgctgatgaaattgaccgttgcgatcccgaggcacttgcacttcaattgggccaaattgcgtatcaactttgcggaaataagcaccatttctagagttgccagtattccagccatttctggcatagggatcatagcccagaaaggcagtcaattcagcttctaacaagttattaacagcctgttgtagctctttgcgcaataaatcatttattttgtctggattgaatagagcttgagcaaaatctttggtaaaatcattcatgaaggagttcttctttctgtatgtgtttttttgttcaaaccaatcatacgagaaaggaactcctttttctaatgtttaaagaaataaatttaaggaatcattcatccttacacaaactattttacagtctccaaataaacactggtcattttaagccaggtcatcttttatcagaaaatcaaacgcgtattaaacttaacatgtctcgtactccaattagagaagcaatcaaacaattggaaaatgaaggcttactagttcgtcaaggacaaaaaaaatcgttagccatattacattagctgaattaaaagacaattatgatttacgttctctattagagagttatgccttggaaaaaaattttcccaatttagatccacaactggctaatgattatggaataaaattccaagaaattttagcaaaacatgattggcaagcttatcttaaacttgatgaactattccatgtatttttaactgaaaataccggaaatcccacgcttcagcgaaccatcgatcttttacgtactcaaaccaatcgtatgcgttatgccatcgtagacaatgatcgttgtatgaaatcctcggttcaggaaataatggatattatttctgcagttgagaaaaaagatattttgttagcctctaacgctttaaagaagcatataaaaaatgtctatgattgggaacaacaatttttacaaaaataagatcattcatcaaaaacataaatgccttttttgctatattttgttaggataaaaaggatgtatcgtctgtaatatggggaaatgtaatgattaaaaatgcaaaacagattttagcaaaaccttttttcaaccaacatgactaaaactttggttcaagcaatttcagttgggctaactactggagttatagttagcgcatttcgctggattattgatcaaactatgaagttgctttatcaaatttatccgcaaatggcagcccagcgagtactgatcgtaccctacatcttattgatgttcattattgcaataacattaggtaaaataactgcgccttaccttgaacaagtaattggctcaggggtaccacaaatcgaggctgttcttttaaatgaaaataagatgccatggtggtccattctttggcggaaatttattggaggcttattagctatctgtcctggattaatgctaggtcgtgaaggtccttgtattgaaatgggcgcaatggttggtcaaggattagcagaaaaagtatttaaatctaacaaggaaaatttgagaacgctacaataatgcggtgtggctgcaggattggctgccgcctttagcgcgccaatagctggtgcacttttcttggtcgaagaaattacttttgattttaaacctcaaaaagtagtagccgtcttggccgccactttttcagctgacttcgttactattctagcctttggaaacaaaccattcctttatttacccgttaacgattatttacctttaattggtatctttttgggaataatggcatacatttatcaatatgtactactttcgctaaagccatggttcagtaaaattaaaaaaatccctgcagcctatcacagtatcattcctttaattttaatcccggatttaaaattgaagtgcaacactaagtgttaaacaaaaaggccatgaagacctaaacttgaagtgacgaaaaatcaagaaaggaagatcttcatgaccaattcaaattctagcatttctaagcactatcatcaattaaccagcgtacaacgtggacaaattcaagcaatgctggattccggcataacttcccgtactgttatcgctcaagaagtcggctgccataagtcgacaatcagtcgcgaaatcaaacgcggaagtgtcctgcaaagagacagcagctatttattgtatgagcactattacgctgatactgcacagatttattatgagaagcgtcgcaaaaactgctatcagcgcaatccattgaagcattatgctgtctttttgagaatgctctccagacgctttaaagctaaatttgatgccaccagcatcgatgaattcgttggtgaattcaaatgccaggctacccttgtcccagcacaccaactgtctatcgctatattgatcagggcttgctggacataagcaatattgatctgcctatgaagctcaaaagacgcaggaacaagcgtcatcacagccatggcggtcacgctttgcacaagaagcatcttggcaattccattgaacagcgtcctaaagagattgaagacagaaaagctccgctgcactgggaaggagatctggttaaaggcgtcagacgcaagaatcagcctgctttaatgactttgactgaaagaaccacacgctttgaagtagttatcaagattcctgactatcgggcaagcacatgccaaaggctgcttcaaaaggagattgacagacatcctgcctggtttaaatcaatcacgtttgacaatggctctgagtttgcggatatgaccaagatcaagggctgccagatttactttgctcacccatattctccatgggaaaggggcaccaatgaaaactgcaatggtcttttgcgtcaattcttccctaagggcaagagcatgaaagacaagtcaaaagcttatgttcaacaggcaactgatgccattaaccacaaatatcgccgaatcctccaatatcacacagcagaagaactcttcaagcaatatatttcctcatagcctaactgttgcacttaatttgacaattcaggctttaattttaattattccagttggtctatttaatgcccacttactcggtggttcacatgtgttaattgataatttattcaatttgaattggaatgtcaaagcctttggatcatgggactttttttactaccgatcttattcttgataattcggtttgtcttttcaatgctttcatatgattcttccgtacctggtggtattttcatgcctatcctagttcttggggcattattgggaataatttgcgccaatattatgataaaattgcagattattttgccaatgtacttccctcatatcctagtgatttccatggccgcatattttggtgcaatagaaaaagcaccattcacagcaattatgctactgactgaaatgattgggactgtccagcaagtattgccaatgattattgttactttcgttgcttactacattctggacattttaggtggaaaaccaatttacgaggacttacgcttgcaaatgaattatcataaaaatatgtcaataatttaggaaaatgtcccaaaattatttaattattagcggagaatttgctctccgctatttttatacgtattgatggtatttatgagctctcttttgttgctttatgaatgattctcgcttccatggatgtgacattggtggaatccactttttcttggtccttttctttttaggctcttggtctacttctggcgatattttggcattcttaggaatttctttaagcagatatacatgctcatctactgtcgttagcagttgtccatctagggcttcaattaccagacatttagttcctttcatgaagcagactaatttgccatattcatctgttgcttgataaagcttgtttttgaaagaaatagctgagccgctatcaaacactctgccagtgagaacggccaaggtataattgattttgcagtcatcaggagccttttcaaaaacataccaggctttacgactagtctgactgaagttttggttaaagtcaggaacaaacacatcatgcaggtatttatttgcctcgttgattgtcatgattccagccaatcttagttctggcttaaggcgaccttggacggtttggttagctctttcaaccatgcctttggcttgagaaacactagtagtttttagatctacgccaagagttttgcaggcatagccaaattgtgtcagcacatctttatgggcagctttggtttgagcagtctcataattgaatacagtccgattatcagtcttaaagcaaaggggaatgccatattccttaagaatttgctcaaagacgtgatagtagccattcaaagtctcttcccagtcaaaataagccccaacaataatgccagtagcgttgtcgattgcaaggtgcaggtaagccttacgcttaccaaaccagactaagacagaagcatccatctgaatttcttcgccgaagtacttgcatctttcatggcgaggatgagcatctgccaaagctagttgatgatcaactgcagcgctgacttcttgtttgctttgcttagggtgctgcttatgccatttctttttggctaaggcacgcttagtctttctccaaggcttaggggaaagaatatcctgctgcttgagcaggctgtaagctttggtataagagacatgaatgtcctcaaagcgatctaacagctgtacaaaatgttttatattgcagtcttgatatttagtacggtataaggttacaatttgattgttaatttctgtggtgagacaattaacaggtttgcggtctttgttcccatgaacgaaggccgcttttcctttagcttgatactgcttgattctcctgtttatttgtctaacggatattcctagcttcaaggctgctcttttcttattgccgttgtgatctacaagatccttaatgactttgtactgttcatcatatttcatagttaaatcaatcctattcactctaactataacctccaataaaggaaattatgtcatacttactacaattaggacattttcctaagttaacagttaagacattagagactgtcaagaagtttgtgtaaataatctctctcgttgattgacttttttatttatcttttaatcaaaataggattctagggtgtctcgaacttgcccaaatcctttatgaatcctgttaaagtaacggtcattgtaatccattgcctgaactccaataaaggtgtcaagcgactgctcagttggaaattctgttttaggcttggttttccgcttaagcctgttgttaaaggattcaatcatgttagttgagtaaattgaagctctaatagctggcggatagttgtaaaaggttaacagatcaggctcaacctgtctaagatctctaactacgtttttgtaggctttttcccagttttgatagaattcatgcagcacctgtacagccatttctttgtttgactgagtatgaatctgcttgaattcatccagtgcttttttcgatcgtcaacccgcattttggcactgatattacgcatgacgtgtaccaagcagcgttgaaaatgcgctttaggataggactggcagatagcctctttcatgccaactactccgtcagacaagaagagctctacctgttcaaggccgcgactcttgaagcctttgagcatttcgctccaaatctcaatattttcagtaggcgcaatacagtagtcaatcacttctttatgaccattaggtttgataccgatggcgatataaactgcttcgcgctcataagtgacccgcttaagaggaatataggtggcatcgagataaacgcagaagaacttatctgacagatgtcgctgatgatatgcctcaactttgggaatcatttctttagaaatattggaaaccatagctggagaataatagccgccatacattttctcaatcaaatcagcgatttctcgggttgtgacgcccttggaatagagcttgataacagtttgctctaaaacatcagtatgccttttataatctggcatagtgtgttgatgaaactcaacgtttctgtctctaggaactttgatttctatttgtccgaattgcgtatcaaccttgcggtaataagcaccatttctagaatttccggtattccagccatcgcgctcataaggattgtagcctaaaaaggcagtcaattcggattcaagcaggtcattgacagcctgttggagcttttgtctaaataaatcattaattttatcctgattgaatagagcattagccatatctttggtaaaatcattcatgaaggaatctcttttctagtatgtttttcgttcaaatcaatcatacgggaaaaggattcctttttctaatattcaggaaaataaaattaaggaaatattcatccttacacaaaatattttacggtctctatcttaaagtcattgcttcactggagtgatttagcattttcataactaaagcagtattatgattagtctgctgataaaccataaaagctcctgtttttctcattgagtgtgagccaatccaattaaccccaattttaagctcggtctgatgacaaattctataaaaactattttctcttattggaacatcctcacctaatctcctagaacttggaaatagccattcagaagaaaacagcttcgtgtagggatgcttcttttcatattcttgcagccaatcatagtaatcctctaaaacatccctaactggagttaaatataatcggttaggcttttttgtctttttgtcaacgatataagcatttttcttaactctgccattggcttgaaagacatcattctttttcaaagctagaacatcacttacccgtagtaaggttgctttaccggtttgaaatatagcatagtttctttctcccatactagtatcttcacgtaaatgtttcaaaaacttctttaaaattattggatcagtaattggacgagtatctttatgcttcaatttacgtctccttctgtcaatttttatattagtccttgatatacaagtatttcgtcactctatgttgaataattagtctatagctaattatactacataatcaacacaccccaaaattggcatagcagaataatgcatgattagatgtactatgtagaataaaatctcattattctacatagttagaaagtacaaaaaagaatgctaatttcccataaaaataagaattagcattctattgcattaaatgattaattttaacctctgcagtcgaacttgacctcagaatcgtcctctcagcataatcgaactagccttaaaattggcataattgttttacctattctagtcccaccatatcattcacgaaaccttgaagtttgtctaatagctgaatatttacgtgattaacaatttctccatttctagattcaaagtcaaaattctgaagttgccataaaacaacataaccttttactccagtgccattactgcctggaattaatattggctcgtaatgtgggttgccttgatatttatctgaagtagtaatcggcatccctataaacatatgtgttgatttattataggcactggtactcattaccacataatgtcttctaatattacctttatgcggattatggccacccatttcatgtccggaatgaggttctgcatctgctttaacaatatctccctttttcggataaatcattaatcaactacctcacgtcccactggttttactgattgtagttccacgtcattttctatgtctttttgataatcataattttgccattctttggttgcaaaaatatttttctttttcttcacgacgggtgtaaaaactatattcatcccctcatttttcacagtatactctttactagtaattattatatctttaggaactgttaaagtttttgaatttccaacttttcttaattttacagtcatagttgtacgcctctttcttttttgtgtatatttagtatacacaaaattacaaagaaagtaaattatgttttagcgttacatcaatagatggggagatattctttgttctttctcctagctatttgtccttattgcataaaaaatctaaatattttaaataaatttagcatttttcttttttgcgaatgtaactgctgagaaaactgtatataatagctcttgacccctttagaaaaggaatttagttttctatgaaaggaattaataatggacccggatttaaaattgaagtgcaacaccaagtgttaaacaaaaaggccatgaagacctaaacttgaagtgacgaaaaatcaagaaaggaagatcttcatgaccaattcaaattctagcatttctaagcactatcatcaattaaccagcgtacaacgtggacaaattcaagcaatgctggattccggcataacttcccgtactgttatcgctcaagaagtcggctgccataagtcgacaatcagtcgcgaaatcaaacgcggaagcgtcctgcaaagagacagcagctatttattgtatgagcactattacgctgatactgcacagcttcattatgagaagcgtcgcaaaaactgctatcagcgcaatccattgaagcattatgctgtctttttgagaatgctctccagacgctttaaagctaaatttgatgccaccagcatcgatgaattcgttggtgaattcaaatgccaggctacccttgtcccagcacaccaaccgtctatcgctatattgatcagggcttgctggacataagcaatattgatctgcctatgaagctcaaaagacgcaggaacaagcgtcatcacggccatagcggtcatgctttgcacaagaagcatcttggcaattccattgaacagcgtcctaaagagattgaagacagaaaaacgccgctgcactgggaaggagatctggttaaaggcgtcagacgcaagaatcagcctgctttaatgactttgaccgaaagaaccacacgctttgaagtagttatcaagattcctgactatcgggcaagcacatgcccaaggctgcttcaaaatgagattgacagacatcctgcctggtttaaatcgatcacgtttgacaatggctctgagtttgcggatatgaccaagatcaaaggctgccagatctacttcgcccacccatattctccatgggaaagaggcaccaatgagaactgcaatggacttctgcgtcaattcttccctaaaggcaaaagcatgaaagataagtcagctgcttatgttcaacaggcaactgatgccattaaccgcaaacatcgtcgaatccttcaatatcacacagcagaagaactcttcaagcaatatatttcctcatagcctaactgttgcacttaatttgacaattcaggttttagaatatgctatacttactgatagaaagtgtgtaggatttacatataaaggtgtaaaacatggcagtaactattaaagaaatagctaaaaaagccggcgtttctattgccaccgtttcgcgatatcttaatcagaatggttacgttggcattgattcggctttaaaaataaaggaagctatcaaaaaactgggttataaacccaagaatgcaatttccgctaaaacagaattaaacttaattgaaatcaatttttcgcaaatcaataatcctttctattcagaactgtatgaatacttggctactattttgcaggataaaggttatgattgcattttgcatttagatcattatcaagagcaagatatgcagtattatttggataaatataagcaaaaaaagatcgtaggcttacttaccagctcgccaattcagatttcaaagaagagtggcaagcttaatctaccggtggttagttttgaccgggtaattagtccgcagatccctactgtgcagtcgaataactatgatgcggagatgcaaattgcaaagtcggttttaaagcaaaaaaagaagaaagtaatcattattgctggttccaaagaagactattatccaatcagtgatcgtatcaaagggatgatgtgtgtgtttaatacctttgacgttaaatttgatttacgctcaattagcgcccgtgaatcaattatcgcatcgtaatcgctatccttcaatttttgaaagataacgattacgatgcgatttgttgtacggatgacattacggctttattggctaaagaatgcaacgattatttaaataaaaaatcgttaattacaggatttgacggcacacaattgattcagaacctattcccacatttaattagtgcgcggcaacggactaaagagattgcgaaattaatgatccagcggtatcattggagagtgtttatactttgcccgttagcttgattaatcaggattaaaaaaacaggattgcccattttggaaacaatcttgttttttaatatttttaattaactatctaaatctaaccaattcttttaacatttctagccttaataaagctaccatcttttaattgatagaatttcttccctttaatcttaacgaccttatcagaatgaagtgaaatatgcttattcttcttaagtaaaatgcgctttccattcttcttaactgctttaccatgcttattataaacgaatgagttatgagctaacttatagtaactaacagtattagcaactttgacaaattgatttttagctactttatagaacaacttacctttaatactatactttttaccattatccaaaggcttaattgtatctccagctttcaagacaagcttgttatcattttgataaataggatttgcttcactgtcatacacataagcattatgggtcaataatatttcagtggttgtattatcctgagtagaaactgtagtagtctcttctgatccattaattatatttttagtattgtctataatactattttcacttggagcttcaggtgtaataattgtttcttgcggaacaattggattggctggcttttgatccggaatccttggattttctggtgtagttggtttacctggcttatcacctggagtggttggacttacaggctgatctggttttggcacgtctggtaaaaccattgttccatcttcatcaactacaagtgtacttaatggtgccagcatagttttatcacttaatttcacattgccatcactatctaacaatttcttaccatgtgataaatcaacattatttagagcaactttatcattgttgacattaaagacaattaataacttcttgccattaacattatattcgtactcaaatacacccttgatgtttttatctttggtttctctaccataactaataattttagtaacattctcgtcataaatcttattgaaatcattcaaatgcaaaattggcagctgtttacgtaatttagccaatttttggaaatattggactgatgctttattagcaccaactctttcccaattaatttcattaatatttactggtgaattatatgaatttgaattgccacctttagttcttaatgcttcttgacctgagtggaagaaagaaataccctgtgaaagcatgatcattgagttagccaatcttactctcctggcaatattctcatctgattcatttggcattgcagccttgatgtaatcatacaacgtcttaccatcatgacaagcggcataattaaccatttggcttggagttgcatagttatgtggctcccaagaatcattatgtaaccatttacctcttaaaaaactatcggtaaacaagacagcatgcttatcaaagtttttttcattaccgttaccaattactaatcctggttcggagccatcattattacctttaaccgagtttctcatatcatcactaaagaaaccaacattaggaactttatccgcagtgtattgggtcgttccttcttctctagtatatttctggttaccaacttcccagccttcaccataagtaataataccaggatcaatcttatctagagcagctctaacatcattcatagtctctcgatctagtaaggacatgatatcaaaacggaagccatctagattgtagttcttagcccagtaaactactgagtcaacaatgtacttgcgaaccattttacgttgactaccaatgtcattaccgcagccactatcacttgtggtattattatcagcatcgtaacggaaataatatcctggcactgttaatttaaaagcttgctcttgaggattataaacatggttgtataccacgtccataatgaccctaataccagctttatgcaggccattaatcatttctttcatttcgataattctagcagttggattagttggatcagaagaatatgatccttcaggcacatcataattctttggatcgtaaccccagttgtattgattctttaaactcttagtttcatcaatgctagcgaaatcatatgaaggcataatttgaacatgagtgatgcctaatgccttgagatagtctaaaccagtaacttgtccagttggtgtcttacctgattcaatcatccctaagaacttacctttatctttaattcctgagttaggatcactactaaagtcacgaattgaaatttcataaacgattgcatcagttggcttagagaatgaaggcattcggttaaaatctgtcggtttgatattattgtagtcttcaattacacttctaacgccattgacagtaacggctttagaatatggatcatcagtctgtgttattttgccattaccaaaagttaacttaaaatcataagcccagccttttttatcgcccttaataataccagtccaaacacctctatcgcctcttgtcaaagcaataacattcgtaggcttggcactattatcaacactatcatataaattcaattcaacatctttagcagttggagcccagagtttaatttgcgtctttttactatcataggtgcagcctagatcgtcaccatcataggcatatttatcgtcaaaagctttggaacgaacataaggaccgatatcaacatttttaaagttcatccctagtccaacttggttatcctttaaaatatcaatatctgttttggtatgaataataaatttctttgctttaccatcagcattagcatcgactgcttcaatatgatcaatactattatttcgcagactaagttttcctttaattttatcgacagtagtagccttacctgcttcaacagtcaaactatctggtgaagtcatatatgcagaagatagactttgatcagctaaggcaaaactcttgctataataagcttctgtatcatttttaactaaataaatatctgtcgccttattacccggtaacggagtgaattctcttgttatttcatcagaaccaactggcgcaacaaaaagtttactaaaatcagtattgtctaatttgattgagccatcttgactattgccttgtttggttaagctaataagttgtttattatcttgatccttatctgtccaaacattaaccttattaacttggtcatcaccgtaataatgcaaatttatatttgcggaatggtactctggtgttaccttttgggcatcatcactacctgctttatagaagacttccgctttgccattatcgctaacatttaagctacgatcagcacctgtaccgtctttaccagcccaactgcctttggttttaattaaaactcctacttggtcatagtttttatctaaatcaataaccgagtaatacccattatcatctttgccggcccatttgtattcattgccgttaccattaggtttcttaccccaaatataaggaacccatttttcaccatcaccattgtagtgaataactactttagtctgatctttaacttcctcacgtgctggagagttatttgttccctcatctttagttttggctgccaaaactgtaggaacgttttgaggagctacaccttgttgacgctgctttgcttttgcgttactttgattttgtacagtagcagtagctgcattatctttgctagaattcgtttggcctacaacttctgaacttttaggagctgcattgtcttctgcagcatgaacttgagtcgtagttaagtttgcccctaaccaaagactcataatagctgaagtacatacaaaaattgatttaaatttgatattatgaccactctttttattcataaataaattcctccacaaaatcatgttttttcaaattcaacaataaacgtatgcgctttcatttgcaatataaaaatgatttctgttatcgataacattatattcacaaaattcatttttaatagttaaacaacttttatctatgtttaaatcaattattaatatgtttgaattgagtagtgaagaaatttaatctgaaactgtcaaattttttgtgtaaatagatttttctcgtagattgattttttaattatttatttaatcaaagtaggattctaaggtgtcctgaacctgaccaaagcctttatgaattcgattgaaataacggtcattgtagctcattgcctgaataccaataaaagcatcaagcgactgttcagttggaaactctgccttaggcttagctttgcgcttgatcacattgttaaatgattcaatcatgttagtcgaataaattgaagctctgatctgcttgggatagttataaaagaccagcagatctggttctatgtctttcaagcttctgataacatggctgtaaaccttgccccatttggtatagaagtcatgcaggacagctgtggcttcttctttgtttgtctgttgatgcacctgtttgaattcgttcatgatcttttcacgatcgtcgacgcgtactttagcgcagatattgcgcatgacatgaaccaaacagcgttgaaaatgagctttaggataagtcctggccaaggctgttttcatgccaacaacaccatcagaaagaaaaagctcaacttgctttaagcctcgggatttcatgttttgaagcatatctgtccagacttcaatgttctcgctaggcgcaatgcagtagtcaatgacctccttgtgcccattaggcttgatgccaatggcaatatagactgcttcacgctcaaatgtttctcggcgcaaaggaaggtatgtcgcatccaaatagacgcagaaaaacttgtcgcttagcttgcgtttgtggtaagcctcaacctttggaatcatctgcttggaaatatttgatacctgagctggactgtaatggctgccatacatcttttcaattagatcggctatttccctggtggtcacgcccttggagtaaagcttgataatcatgctttccaagatatccgagtgctgcttgtagccaggcagcgtgtgctgatgaaattgaccgttgcgatcccgaggcacttgcacttcaattgggccaaattgcgtatcaactttgcggaaataagcaccatttctagagttgccagtattccagccatttctggcatagggatcatagcccagaaaggcagtcaattcagcttctaacaagttattaacagcctgttgtagctctttgcgcaataaatcatttattttgtctggattgaatagagcttgagcaaaatctttggtaaaatcattcatgaaggagttcttctttctgtatgtgtttttttgttcaaaccaatcatacgagaaaggaactcctttttctaatgtttaaagaaataaatttaaggaatcattcatccttacacaaactattttacagtctcacagatatttttttattactaaaatttatatataaatttgattgatcatatataaatttagaatatcaatttgcaacaaaaccgcttacaaactataatgaaattaacatacaatatatattgagaggagaaaaacgaatgacccactactacgaaggctttccacaaagtgaccgcgatgaaaaaatcaagatggtgaatgtggatgaacttgaagaacgtgttaagaaggtaatgccagaaggtgcatattattatattgcttcgggtgcagaaaatgaatggacctggcgtaacaatactgctgcttttaatcattttcaaattgtacctcgtgctttgactgagatggctgatccgcaaactgatactgattttatggggatgcacttaaagacgccaattatgatcgctccaattgcttgtcatggaattgcacataaagatgcggaagtcgcaacgcaaaagggtgctgctatggctggtgcgctctttagttctagtacttatgctaataagagtgtagaagaaattgcagctgcagctccagaagcaccaaggtttttccaactttatttgagtaaagactggaattttaatcagatggtttttgatgcaattaaaaaagctggttatcaaggcattttcttaaccgttgatgctttggtatcaggttatcgtgaagcaaacttgcggactaactttacttatcctgtaccattggacttctttaagcgttaccttggtgcaaaaggtaaaggtcaaagcgtagctcaaatgtacgcttcttctgcgcaaaagattggtcctgaagatgttaaaagaattaagaaagaatcaggtttgccagtctttgttaaaggtgttatgtgtgctgaagatgcctataaagcaattggagccggtgctgatggaatttacgtaactaatcatggtggtcgtgaagttgatggtgctcctgctaccattgatgttttgccagaaattgcgcaagcagtaaatcatcgggtgccaattatctttgattcaggtgtccgtcgtggctctcatatctttaaagctttggctttgggtgctgacattgttggaatcggttgcccatatctttatggtttagccttaggtggtgcgcatggagttgcttcagttattgaacaattaaatgatgaattaaagattgatatgcaattaacgggatgcaagacaattgatgatgttaagcatgctaaattgacgcacattgcttatactgctgataatttgccatctaatactgatccaagcagacgcaaggaatatccggtaactgacgaaaatcaagttaagcaaactgatgcggtatctggtgcttctaagttagaaggaaagccagctccggaaccagagactgataccacaactggtgcttcagtaagataaagcaaaaatataattaatattttcaatatgattgtcattgaataaatgatagtcatatttttttactatcaagaactcagcggctacaatcaaggtgaaagcgattcgatttttggagaggaaaattaaattattgaagagaataatgttttgactgatactgaagagcttaaaatcttgagtgatcttgttgcaataaaatccgttaatgataatgaaattttagtagcaaaatatttacaaaaactattaggagaacatggaattagttcacgtttgttggaatattccacaactcgcgcagatttatttgctgaaatcggaacaggccatcccattttagcaatttgtggtcacatggatgttgtttcaccaggtgaattagatcaatggcatactgatccctttaaattaaccaataaggatggtaaattgtacggccgcggagcgactgatatgaagtctggtttagctgccttggttattgccatgattaatattcatgaacaccatttaattaagcatggtagtatcaggctgctagctacttttggttggtgaaccttctggctacagtattgccattgctcataagggttcgatggatactaagttaacttcccaaggcaaggaagctcatagctcaatgcctgaaaagggttataatgcgatcgatccattaatggatttattagttaaggccaacaaggcttttagagaaacagataaaaacaatccagacttaggtaagttgacgttcaatactactgtttttactggcggggaacaggtcaacatgattcccggagaggctaccgcgcaaattaatgtgcggactattcctgagttcaataatagtttggttgaaaagaaattaactgaattagttaaggcagaaaatgcgcaaggagctaaaatcaaaatgtacatctatatgtcggaaccttcaattaaaactgacggtaagtctgaattggtaaaattagcccaaaaaattggagcaaaatatgcggaaaagccgattccaacagttgctattaaaccagtaactgatgcttcgaatttgattgccgacaaaggacctagctatccgtttgccatgtttggtcccggtaatgacacgccgcaccaagttaacgaatatgttgatgaaaagatgtatttgaactttgtgaagatctatactgaattgtttgtggcctatttgaataaataatttggaaagtaataaagagcctaggcaaaattttagcctagacttttttattgtattttgaagtattctttagccgcatcactcatccgttcaggggtccaaacaggataccagacaaattctacatcaacatttttaacttcagggacttttttaacggctgttgtaatctgcttgatcaaataatcagtcaaaggacaggcaggtgtagttaatgtcatattgatgagacagatcccatcttgatcgaggtcaatttcataaatcagccccaagttgaccacatcgacgtttaattctgggtcaataacttgagctaaatgttcaataatatcgtttttaattgttttgctatcacgcattgtgttacctacgcatctttaccaaaaatttttgctttaattgcttgacctgttggtgtaccagctaaaccgccgattccagtttcacgcagagatgccggcatttgatgaccaactttcttcattgcttcaatacattcatcagctgggattacacttgtacatcccgctagcgccatatcagctgcgataagtgcattaccagcgccaataccatttcttttgacgcagggaacttcaaccaaaccggcaatcggatcacagactaacccaagcaagttagacatcgcaatcgataaagcttgggcactttgttcagcactgccaccagctacttcaactgccgcggcagcacccatggctgaggcactaccgacttctgcttgacagccgccagttgcccccgcaatttcggcattattggcaatcaccatgccaaaaccgccagcagtaaaaagaaagcgaatcatttgctcttcgctgagctgtaatcttttttctaataaaaatagaacgccaggtaaagtgccggaagaaccagccgtcggggtagcgcagacaacgcccatcgctgcattgacttcgttagtggctatggcattttcaactgctgccatcattgtatcgcctgaaagtgtgtgtcctttctcgcgatattttttcagcttaattgcttcgccaccagttaagccagtttttgaaaagacaccgtttccagattcacctcttttaacggcagctcgcatagtttgcaagttatatttcatgcgctgccagactttttctcgtggcaagcctgatagttgacattcttgttcaataattaattcagaaataggtttgtgcgttttttctgctgcagcaacaatttccttaatatggttatacataatattgccctatgttataaacaaataatattctcaaattttttatttagttcttgcaataaatcaggatgaagataattttctacatcatattcataaatattatagtttttagtatgaaaaattcgtttgcgactaaagggtgctttttcgtgtaagagcgcggtaagctcttgttcaatgcgaatatttttgtgtggatcaactaaaataataataggtaatgcaccagcaggttgaatctcggtattatgtaagacaattttgcgaatttcaattgcaccaccaccgatagagcatccagccaattccactttctttttatcattagacatatttaaaatagcagtattagggtgaccaattgggctaggaccatcttcttcaacaaaacgtaaatctacgccgcgctggcgtgcaatctcaggtgcctttggtacgcgtagatcgtctgagtcaaagcctaaaatacctgccgcaatagcatagtctgttccatgaccacggtgagtttgggcgaaagagtcgtaataatgaacggtaactttactcggggtaccgccaaaaagtttgtaaccagcgcgtccaatagcgacggctccggccgtatgtgaacttgatggtcccaccattacggggccaataatgtcaaaaacacttttataccgattagtcattttaatccctgctttgtaagttattctgtttttaattataacacgcgtggtgctagttaaatcgttttagttaataaaaaagtccaatcttgttagactcgacttgtaaatagtaataatagaaaagagtctgatctgattgaactgccttaagcttaagcgttttagccaccatttacaagttagttttaaagatttagtgataatttgtcggcactggtatcgtttgtatgcaccggctgagtttactcatcggcgaaatattgatcaaattaaaactacggacagtctgattttggctttacttatctggcaagctaagacaggaattgaatcacaaagaagattctgtgaatgtttcaattgtttatcacactcacgttttaatcggcgttcacgtcagctattgcaattgatttatcagatacggcaagaaatgaataaaaaggttgacctgaatggacagttcttgatcattgacagctttccggtacctgtttgccaaccaattcgaaactatcgtgctaaaatttttcgcggttatgccaacattggttataaggccaccaagaaaatttacttctatggtttcaaagttcatgccattgttagcgatgacggttacattcttgattatgtcgtaacaaaggcatcagttcatgatgccagggagacagttgaactgatagaaaatacccatccatctaattactatcttcttggcgacgaaggctatttaggcaaagaactgcatcaacagctaaaacaaatgggttacgaactttggacaccatatcgtaaaaatatgacaggagctaaaaagcacaatgatcatcaattgatggctattcgcagaacaattgaaagcgacttttcgcttctgacctattacaatgccgagaacaatcgagcacgtagtctgataggctttcaaagccggttggaaattgcaattttagcttataatttggcttattgtctagaacgatttaactagcaccacgcgtattataacgaataataaagaagattaagaaagttttttggagactgtaaaatagtttgtgtaaggatgaatgattccttaaatttatttctttaaacattagaaaaaggagttcctttctcgtatgattggtttgaacaaaaaaacacatacagaaagaagaactccttcatgaatgattttaccaaagattttgctcaagctctattcaatccagacaaaataaatgatttattgcgcaaagagctacaacaggctgttaataacttgttagaagctgaattgactgcctttctgggctatgatccctatgccagaaatggctggaatactggcaactctagaaatggtgcttatttccgcaaagttgatacgcaatttggcccaattgaagtgcaagtgcctcgggatcgcaacggtcaatttcatcagcacacgctgcctggctacaagcagcactcggatatcttggaaagcatgattatcaagctttactccaagggcgtgaccaccagggaaatagccgatctaattgaaaagatgtatggcagccattacagtccagctcaggtatcaaatatttccaagcagatgattccaaaggttgaggcttaccacaaacgcaagctaagcgacaagtttttctgcgtctatttggatgcgacataccttcctttgcgccgagaaacatttgagcgtgaagcagtctatattgccattggcatcaagcctaatgggcacaaggaggtcattgactactgcattgcgcctagcgagaacattgaagtctggacagatatgcttcaaaacatgaaatcccgaggcttaaagcaagttgagctttttctttctgatggtgttgttggcatgaaaacagccttggccaggacttatcctaaagctcattttcaacgctgtttggttcatgtcatgcgcaatatctgcgctaaagtacgcgtcgacgatcgtgaaaagatcatgaacgaattcaaacaggtgcatcaacagacaaacaaagaagaagccacagctgtcctgcatgacttctataccaaatggggcaaggtttacagccatgttatcagaagcttgaaagacatagaaccagatctgctggtcttttataactatcccaagcagatcagagcttcaatttattcgactaacatgattgaatcatttaacaatgtgatcaagcgcaaagctaagcctaaggcatagtttccaactgaacagtcgcttgatgcttttattggcattcaggcaatgagctacaatgaccgttatttcaatcgaattcataaaggctttggtcaggttcaggacaccttagaatcctactttgattaaataaataattaaaaaatcaatttacgagaaagatctatttacacaaaagatttgacagtttcatatctgtaagagcttacagcaaaagttgtataataaagacgttgacactattactgcaagaacttacttaaagcagattagtggcattttctttattgcatgcccttactggataggttgcactgcaaaaattaagaaaaagaggcataatttatgaaaaaaattttagcgattaattcgggtagctcttcttttaaatttaagcttttcacctttcctgatgaaaaagttatcagcgaagggatggctgatcgagttgggcttaacggctccacctttacaatcaaggttaaaggtgaaaaacaccaagaaaaagttgacattcctgattccgaaactgccgttacaatcttgcttgaaaatttaaaaaagtatgatttaattgacgatcctaaagaaatcatcggaatcggacatcgaattgttgcgggtggtgaagaatttaaggactccaccttaattgatgaaaagtcactacaaaagatttatgatttgaaacaatatgcgccgcttcataataccgctgaagccgatgtcattaatgccttcatgaaagtattgcctggcgtccctgaagtcgctgtctttgatacttcattccaccaaaccttggatccagtgcactacttgtactcacttccatataaatactatgaaaaatacggtgcaagaaaatatggcgcacatggcacttcggttagatatgttagtcaaaaagccgctgaaattatgaaacgcgacttaaaggacttgaaattaatcgtttgtcacttaggatctggtgcttcagttaccgctgtgaaagatggtaaatcattcgatacttcaatgggcttttcaccaatggcgggtattacgatgagttcccgttcaggtgatgttgatccttctttacttgcttttgtcatgaaaaaggaaaatcttgatgctgatcaaatgcttaaggttctaaacaacgaatctggtttgttaggaatttcaggcatttcaccagatatgcgtgatttacgtggtgacatgactaagctcgaaggggaaaagaagaagcgtgctgacttagctagaaacattttcattaatcgaatcattcgctatgttggtgcttatacccttgaaatgcgtggcctagatggtatcgcctttacagctggtgtcggtgaacacgactttggtgtccgtgaacatgtcatggattcactcgaacttttaggccttaagcctgattcagccgctaataaagaaaatgccaccattattaccaagcccgactcaactattgttggtatggttattccaactaatgaggaattaatgattgaacgtgatgttgtcagagtagctggcttaaagtaaaaaatagagaaaagaaataagacgaaggacaaaatccttcgtcttattttgcgtattaagccattgctttttcttttcgttcattatatgcgtaataaatccaagcaataacaccaaaggccactggaccaatagccgtccagaatgaagtttgccagtctccggtaaagagtggttctatacaagtaaagataattccgaccgcaaccactaaccaaacaacaattgtcgttgcccaaacttttttcttaccttcaataaaaacaaatggccgatctaagtcttttttagctttaaaaaatgggtaagcagcaattaaaaataaatatggtgctgatgaagaaacattcatcatatccattaaaattgtatagaattgttgtgctccattaccaccaaatgaaataaataagataataacgctaaccacaattgcttgtacccacatcgagaattcaggcatattgtgcttatttaacttaaccattttcttaggcaatagtcgcggatcacacccctcaataaatgatttaatcggtgaataaaccatcaaaaaggcagcggcaattcctgataacacatccgcaattccggccaaacgagaaaagacagttccaattgccagtgaagtagaatgtgatagacctaggctatgaccagtgacaatacctaaattattaatcaaaacatattcgacattagctaagtcaacacctttaccacctaacgatttgttccaattaacagccaccccacacataaagatgtttacaacataaagtgctgtcattaagaccatggccgtaatcagagccttaggataattcttttccggtttatcaactgaatcaattactcctgaggttgtttccagaccaccataggcaaataaagcatagacaataaatgaaataaccgcaatcggtgactgaaatgctggattaggtgaatgaaccatattttgtgcggtcactggttcagctaattgcccatgattcaaaataaagacaaaaagtgaaactgctgtaaaaccaatggcaattcctaaagtaaagatcccaccaatattattaatcgcctttattttatcaattccctttgcggcacaaaatgtaacaattactaagaaaataacttccaacacacctaataactgagttgaagtcagcgaccctaaatgccagcttggggtagtatcatgaccaaaaattgccgttgaaactgaaactaagaaaaattgggttgatgaaactaaccaaattacccaagctgccagccaaataaaagttccgataaatgatactttttcattagtagatccttcaagccatgaaaagattccacctttaattcctttaaaggaagcaccatattcagcgaaaattaaggctgatggcaggaagaataaaatagctgtgacaatataccaaatgatacttgaataacccatttgataaaaagctgtcagtgaattactaaatccaaaaatagaagaaaaaatcatcaagacaagactactaggacttatcttaacgtgatcattattcttcataaaaaataaaacaactcctttaacataaacaaacaatttctattatgaacttttatcatgatattttcaaaaagagcttttgcacacaaaaaaagcaggcctattcggtctgcttaagtaattaatcataatcttctggattaatatcaggtttaggtaaatctgaattattattcagcactactccttgaatgccattttcataggtccaatcttttaacatattcattttgccggttaaataatattgactaatcagcttgttccatctatcccacttatcaagtggggcattaattaaacctgctccatggtcaatcattaatttatttgcagctagtgtggcagtacgcttatttccgccccagaataattgattacgcatattatgatacatcaatgtcattgccttatctgtagtcgaggtatcgttgttcattaactcatcgaaaaatttttcttcttgtttgtagtttagattatctcggaagccatagcctgtcagtaataaatgtatctttagttcaatatctaaagataacaccttattttcattaataatatattgccatgctcgttttaatcgaataattctttccttatctttctcggaagccctctctatatttaacccatcagcaactaattgtgtttgaattaaagaaatatttgttttctcaaaatgcaaatcactaaatattagtcgagcaaggttagttctggcaaatcttctatttaaatcttgtgttaaatagaatttatctgggtataacatatttttacacctattatcttatcctctgcctcaacaattctggcctttgcgccagctctgcgtataaatgacgaccatttatgctaatcccctcaaattcacgccctgtatgaaagtgacctctagccagcactttacctgagcgtttcaatttaaacaaataatcattaaaggccaaataaatctgttttttatgcttgtcataggtaattccttgaacgggagaatcattgcgcataaaatctcctctagtagcgccaatctctttaggataccaactattaccctgacgagtaacttcccaatattcaaaacggtggtctgtggcatcatggtaaacggcaataaattggtgatcatttacaaaagtagcattatggaaataacgacctgttctagctgaatgattccaaactttaaaagtccaaatctgtttaatttgcaaattgtttttactaatctgcataatttcttctgattgagagctcttgcgcaataaatggttattagcaatcacataaatatactttcgagttgaaccgattgcttgtccatgtcccaatttaatatatgggcttatcttaacatgggatgcaagccgcagaaattgtgaccaaggtagccatggcaacttttgcatagtatagcgattaggcacttgattaaatttgtaagaaacaatgtgagcacgcgtatcattaggtgaatgatacattgtggcatacattgaaccatttgacacggtcaatccttctggtactagtcccaccgtcccagttaccgaatcactttgacataaagtcgcaggttgatagaaataggttttcagtttaaaatgaacactttttaaaacatgcgatttagtttccggcgcaaaacttctgccccaattaccagacgtcttatagtgcttgaaccagctacgagcactgtctccagcttgtggttttttggttgctttaacaatgccctctctagcattagctctcacttgaacaactgtctgagcatgagctttaccataagaataacttacccgatagctttcctttttacttgatgaaacttctgctcgagatactttaactttacttggctcaattatcgttcctgctgcatctgttgcataattaatcgcatccctagttggaaaactataatgcgaattcttcactaaactaatctgatgtacaactgcaatttttcttcttaaaaaagctcgctgattgacccaaccgcctctatgtccgtctaaccaaacatagcaatacttattgccgcgaacttttctaactgcactggcttgaacattgccatgtttaaacgtattagcaaggcatagacttcttgacggacctttacgagttaagttttgataaattctataagacgtatgcggattaatcatcttagtctgaaatggatttagttctcgcgcccaaaccatttgcggcttcaaacataataacgtcatcaaacaagctaatcctaaatagacttttactctcttcattcttatttttacaactccctaaaaataacgcaaagtctattgtaggtcagtgagtttttttatcaatattattattattaatttttagatcaaaaaagcgtaaaggacaataattcatcctttacgctacaatttttattaactttttctagttttgaacaattaagttcttcaaatcatctgataattgaactggtgcgtacttaacacttactactttaatagtagaggtctttaagtatctcttcttaccaatataagcatatctgctcttaccgtttttaacgatcatcgatgacttgtacttcttaccgtacttgatcttcttcttggttgccttaaagtaaacctttttagccttagcactcttcttatatgcgtagtagatctttgcacccttttttgacttaggtgaaacaacgatgtactttaatgctctattgttgtaagcatcttgaatggcttttttgtcactttgtgcttgctttgaccagtctgcttgacttggaactgttgctgaaggggtaacatcagtcgaaacaacataaattgcacattgttgtccatctacagtttgactgtcaacataatagaaagtaacagaaccttgatcgttcttagcctcgttagaaaagtaaagctggatggtttgacctttagtataatttgaatccattgactttacgattttaccatcttggtttacagcgtaaagcttaggattagcattattaactgtagctgatactgatctacgcttaatactaatggtaccttttttgcttgaagtttgtgtagttgctgcatgaactggttctgcagcagacacacctgcaccagctaaaccagctgaaagcatcactgcggcagctaatgaagtaaataaattcttagttttcatcgatataatctcctaacgtaatctcttatagttaaattataacattttttattattcgtcaaggtaaagatacgttccccatttcaccggctcttgtttacttggctgaattgcaaaatacagaacaaaaatccaacctaacggtatcagcattaacagaatccaccaacctgtataattgatatcatgcaatcttcttacggctaggcctaattggcataatttcaaataaagatagatcaagccccaaataatcataccgataatgacaatcatcgaagcgtgatcaccattaaaagcaaaaccattgatcatatcagctgaatcattctcatagtgagaaactggcataacagttgccaaaaatgtaataattccaccaatccaaattataacttcagtaataacgattccaatccagaaacttcttctggtagttcttgcattccagataaatggtcgcagaaaagtttctttcataatttgatcaaaactaaaaactggggcctcaccatctaactttctttcaccctggtattcttgtttgtaatatggctcgctcatcgcttattttcctaattccacataaattttgacagctgctttaatagtttgataaacagttgaaacatgcaaagtatgagctaaaaattcttccttctcggctctagtcattgccgaatcaaagaagaccttgatcttcatctcagttactactgatttaccatgaccgagattctccgtttttgcctggttttctaccctaaaatttttaacatcaagttgatgtgctttagtaatcatccctgccgacattacaatacatgaattaacactactacatagatactcaactgggttgggacctgcatcatgtttaacatcatcacaaacaaaaacatgatcacgtacttggttggcaatttgccattctttatcttctaacttagatttaactacatattcgctcatattttccctctaatgatggtcaattgcgccattcaaacgcttacgccaaatgaaataaactactaaaatcaatggaactaagactaattctactggatagaaccattctatcggtaaagcagaatcaattacaccactgatcattgggccaaaggccatcgcaatgtctagtcccaaataaaaggtagcactagctaagccttgttcttcaatcggtgctaacaacagcgcagttgattgcaaaactgaataaatgatcccatagcctgatgccattaaagctgccgctaaagccatttgccaatcattattcattattgcgagcaagataatataagcagccgttgaaactagacttagccaaaaccagacgccaaaacgtactgtatcaaaatacctttttagtcctactctaataatcaacaaaacaaccgcatagatcaagaaatatgacccaactgcgacagtcagatgtttttgttctacataagttacaatatctgcctgtgttacaaaatacgggatagcaaataaagttgtcaaaattgctaccggtaaaacattaaactggataattttgaaactcttcttctgcgttcgaactcgctttttaggcaaagcatgatcacccacaaactgaatggccacaatcattaataaagcagaaacagctgatgctagcaagcttgtgcgataacctattttttgataaatattaattgaaactgctggtgctaacgccattgccaaagcattcattaagccataaaagcccattgcttcaccaacgtgttggcgcggcactaaaaaggctagccaagtagtcatacaaactgtgcaaaggacataaccagtaccgttaatcagccgaaaaagcaaaagccagccacttgatagagtcaaaacataccccatgactccgataaaaatcaaaacgccgccaataaatgataagcggtatttagaaaatttatcagtcaaattaccggctaccggccgcaaaaacatggcggctaagctcataatcccaacaatgattcccgcaaaagcactgctagcgcctaattctttggcatagccattgatcaaaggattaacaaacattgtactaaacataaaaaagaaagatgctgccataactaggacaacatctttggtataaattgattttctcttcgccaaaatgatcccccaattctgctctaattatacaactatcacagaatgatcatttagcaatttttaaactaacagtaaaaacaatgtcttcacctttgtggtgggctaaaattttgccatgaaaggcttcgactaactcttgcgccatagccaggccaatcccaaagccacctttcttagaattatgcgactcatcatcgcgataaaaacgatcaaagaaatggctgtaatctttgcctttaccttcacgataggtattttctacccgcaagaccgcatatttgcttaaagttccgcccttagtcagtttcacctgaatcttgccatgaggatcacaatatttttgcgcattatctagcaaaatattaactacttcggctaaagtatgcttttcagctaaaacatttaagccttcccgcaccgatacttggtagactaagtcattcttcttcatgactgatttaaaatctttagtcgtttcttcaacgatttctgaaaagctaactttgcttaaggtaagctcacccgtctcgccagctcgagccagcgaaatcaaccgattgattaacttagttagtttagccacctgctctttattgctttcattccattcagaattattgcccagcatttcttccatttccgtattcgcggaaataactgctagtggcgtttttaattcatgaccggcattggtaataaattcctgctgcttgtgataagcatcaatcgttggcttaattgccttgcccgaaactaaaatcaaaactaaagcaaagacaatcaaagcgcctaagcctaaaactaacgctactctaaataataaccaaaaacggttaaaaatcagagtttcattcaaaaaaacaatcatcatttcaccagtagaattttttacaaccctaaaggcatattgattttgtcctaaggcaactacaccacttttatcaccattttctaaagctgatctggtaatagtctgtatcttggaattattaattttataaacgttattatcattaattacatgtacctgatggctttcatcaattgttaccgcaaaatagcgatactgataaaccgcttcgggattatactgcccacctaaaaaattgcgattaattggatcatgttgatcgccaaaggctggtttggcattttttggtgacaaacgcccttcatttttgaccaaagccgttagcacgcgatcgacttcattttggctttgaacatgagtcacccaaactaagccgcctaacgtcaacaacaaaactacaaacaaggcagcaacagaagtaccaataaacttccaccgaaatttttgaatcatctgctcacctacttaactagcttatatgaaccacctttatcgccttcaattcgaactgagctttgaattgattgcaatttttgccgcaagtatgaaacatagatccagactacctcgctattggcatcaagatcatttttccaaacatgattaagcaactcttctgttgataattccttattttgatttaacaaaaagtaattcatcaattgagtttcagtcccgctcaaacgaattgaattatgactagccaactcctgcttagtcacattcaaagttacatcccctaattccaacttattaggagtaaagtcatcttcacggcgctcttttgaacgcagccgcgctaacaattccttaagtgaaaatggcttagtcagataatcatcagcaccactatcaagaccagttactcggtcatcaacctcggccttagctgtcaacattaaaatataagtcttatcgccactttcacgaattttttcaaagccgtaattccatccatgactgacatcatgatatccagcataattacgtcataagaattttctttagcatgctcgactgcctttaagccattatctaccggatccacatcataacccgcgtgttccatggccactgttaaaacccgcaatagttgcggttcatcttctgctactaaaatcttcattaactcattaatcctcttccctaattaactgccgaatcgtttgcatcgacacatcacaagaagctaattcatctgctactcgctttaattcattgccaatcatctcaggattcttaatctggtgtttatatttcatgtcatgttccaggctagcccaagtatccatcgcaattgttcttaattgcacttcaacaaaataatgacccggtatattgccgtcaacatcttcatcaggtacagtcacgtcaaaaatcatatgatatgaacgatacccattagttttagcattagtaatataatctttttcctgataaacattaacattatcccactgcttaataaagtcaatacaggtataaatatcgtcaataaaattgcagacaacacgcaatccaacactatctcgattagcacgcaaagctgattgtggcgttaacggtaaatcttttcttttgcacttgccttccatactggcttcactttttacccgaccacgtaaatgttcatagagacgttctccatgtcctttttcataatttttatttaactgctcaaattgcgtcatcatttgatcaagtaatttatctaaagttggggcgtatttcccataaatattcaacgtttatcccttcttccctttttaatcataacaagattatttgatttttatttgaataaagctaatatattttgtgataagtcacaagaaactaaaataagcaaccattactaaaattgagcaaggttgcttatttatattaatattgtttaatttttcatctagagggggaaaagatcaaaatttaacttcttgaccgttaactacaactttataagttaaatcttttaaattagcttttaattcggcttggctggtttgctctttatttttacgaataatttggatttcattttcattaggagtggagacttcaattgaaccatcaagatcaaaggcaggttcattgtttctaaacgtaaataattttaagagcgaactaacgaccggacgcttaacttcctcagccacttctttacggctgtaataatgccggttgatgttgcgaccttctttagttttttccagtaattcaaggtcattcttgccagccagcatccctacataataaacttgcgggatccctggcgcaaagacttgcaataaccgcgccatgaagtatttctgatcatcatcgcctaaagcagaataaaaagtagtattaatttgatagatatcaaggttatgatactcagcacttgaatacttctttttcacattagcgccgacttcatataactcttgactggtatagtcgatttcttcaggggagagaatatcacgagcatcaactacaccaatcccatcatgcgtatccaacgtagtaaactgcttcatcgggcatttcttaagccaggcggcaagactattgctcttgccagaatacagtgaatacaaagttaccattggcaaggcaaaatcatagataaagtagccatgcttagcaatcttgaatggcattgaataatgctcatgaatttccggtaaaatggttgcaccctcgccagccaaatcagcttgcacctctttaagtagatcccaaatttctggctcgacaaagaagtcgtttgtatctagcttcttaaccgcataagcaaaggcatctaagcgaataatgtctgcgccatgttggactaaactagttaaagtatctttgataaacttttgagttactttttgacgaacatccaaatcaatttgttcaggtccaaaagtgttccataacttctctttggtaccatcggcaaaggttatttcctgataaggcgcacggtccttacgcttataaattaaatcaacatcagcttgagtaggacggccttcaggccaaaacttgtcccagcttaggaataaatcagcataagggctttgatccttatttttttgaaaatcttgataatacttagaatgacgagaaatatgattaatcataaagtcaaacatcaggtaatattcttcacctaatttttcgacatcagcccaatcgccaaacttaggatctacagtagtgtagtcagttggcgcaaagccacgatcaccagttgatggaaaaaatggcaataagtggatgccaccaactgcgccttttaagtctttatgtaaaacttcgtttaattcttttagattcttacctaaactatcaggataagtaatcaacattactttgttcttaattgccatcacaaatttcctcagttaattgctttaaagtgataccgataagccatgaaatcgccatgttcaaccggatcataaattcctaggttcatcaattcatcaccgccatatacttggtggcttgcctgatcttcatactgcttattcgggtcaagaccaactaattttgttttagtaaagtatggctgtgcactggccatgaccttaactgttgataaaactacttcgtttttatcaggagaaacagtttcccatgcacattggttgccttcttgcgcatttttcaagcgataaaaagtaccatattgagtaactgctctaattttcttatattcagctacttgctcagcaacagccttttgatctgattcgcttaatttagttaaatcaagctcgtaacctaaatccccccacattgcgacaataccacgcgtcttaaacggcgtaatccggccattttgctcattaggactaaccgaaacgtgcgaagtcatcattgattgtggatagactaaactagtgccatattgaatgcttaagcgatcaattgcatcactatcatcactagcccagatttgtgggttgtaataggccatgcctgcatcaaaacgcccaccaccacctgagcagccttcaattaagaggtcaggataacgatcaacaattttttcaagtaaatcatatagacctaatacataacggtgatagacttcgccttgtcgatctgctggcaaatcagcttggtaaatatcagacaagtggcgattcatatcccacttaatgtagtcaatcttgcctgagtcaagaattgctttcatttggtcaaaaatattattacgtacttctgctcggcctaaatcaagcaagtattggttacgagctggacttggtgttcttccaggaacatgcatcaaataatcgggatgcttttgatacaaattagaatcaattgagatcatctctggttcaaaccacaaaccaaacttaagcccttgctgatgaacgtaattggcaaagtgatctaggccatgagggaattttttctcaaagacctgccaatcgcccaaggaagaattatcatcatcgcgatggccaaaccaaccatcatcaagcacaaacatctcaatgcctaattccttagccttatcaacaattggctttaacttatcttcatcaaaatcgaagtaagttgcttcccagttattcaccacaattggccgaacctgatctttgtatttgcttcgcataatgcgatcatgaatgatactatggaaagcttggctcatcttattcaaaccttgatcggaataaaccattaatacttcaggtgtttggaaactctcttgcgcatttagcatccagctaaagttgtaatcattaatgccaacaacaatcctggtttgcgcatacggatctttttctacttcaaacttgtgattgccagagtaaacaaaggcgaaaccatatgcatccccatcaaactcatttgtatctggatcagccaacgctacaaatggattcatctgatggcttgatgtcccacgaatactggaataaacatgaattccttgattaaccttgtttcgttcaacccgtctttcatgcgcatgggcacctggcagtgtaatcatgtcaaagtcacgatctacgaaatccatttgcatcgaagctactttttcaatttttaccgtttccttgccagcatttctaactttagtcgaacgcacaattaccgaacgatcacgataaattgtataaagcaagtcaaatctcagctcactaaacttatcttttaaagtaatgattaaagtttcagcttcatccttattctttacccatgcatgaggcaaaccttttagttcaggctttcctggcacaatttgataattttcataggttaaaaatactgcattagaaccgtctggttggcgcacaatcattgctggcgttctaaagtccatttcgcctgcactactgtattcttgtggcaaagaatcttttgaaaaagtacgatctaatgatccgggtaaattacctgaaaagcctcgatcaagtcgtgggtaccgcaattcaccatgatatgctttgatacttttaccgaaatacaagtgacttagtgtgccaccatcttcaattgaaatcagatatgaaatttggtcattatgcaaatgaaaaactttatttttttcatcaaatgtaattaagtttttagtcattacttaacctcagttctcaactgctacttcagtttcaggatcaaagaagtgcgccttattcatttcaaagcccatctttaccatattgccaggcttagcatagtctctttggtctaccttcgataccaattcagtattaccaactttagtataaagctgagtttcagcacctaacaattctgaaactaccactttagcttcaacaacattgtctggataggtttctaaaaatacttgctcagtatgaacatcttctggacgtataccaaagatcaactcttttccgtcatatcctttttcttttaatgcctttaacttaccttctggaactggaatttcgaagtcatgattatctttatcaatgatcttgccatcctttaaaattacatggaagaagttcatagcaggcgaaccgataaaaccagcaacaaagacattagctggtttgttatatacttcaagtggactaccaacttgttgttgcttaccatccttaataatgacaattctatcagctaaggtcatagcttcagtttgatcgtgagttacataaatagtagttgtcttcaattgttggtgtagtttagcaatctcggcacgcattgttacacgaagcttagcatccaagtttgacaaaggttcgtccattaaaaagattggagcatcccgcacaatcgcacgtcccaaagcaacacgctgacgttgaccaccagaaagtgctgatggcttacgctttaagtaatctgtcaagcccaagatctttgcagcacgttgtactcgcttatcaatatcttccttgctatacttacgcaacttcaaaccaaaggccatgttgtcataaacagacatgtgaggatacaaagcatagttctggaataccattgcaatgtcacggttctttggagcaacatcgttcataactttaccaccaattttcaaagtaccctttgaaatatcctctagtccagcaatcattcttaaagtagttgatttaccacacccagatggcccaacaaaaacgataaattcatcgtctttaatatgtaaattaaagtccgttactgaatacttatcattaccatcatactttttatatacgtgatctaaatctaccttaaccattgttaaaacctcgtctctattcttaactacttcacagcaccgttactcataccggcaataatattcttttggaaaattaagtaaacaattgtaattgtgatgatacctactacatatgaagcaaaacttggaccgtaatcgttgaaatactggcctgtatagttgtattggaacaatggcaatgtccacatctttgaatctttgttcaagattaacagtggaagcataaagtcattccagaaccacattgcattaatgattaatgttgttgcatgcattggttttaataatgggaagataatcttgaaatatgcggtaatcttattagcaccgtcaatttctgctgcttcatccaaactttcaggaacactctgtttgatatagcttacataaaggaacaatgtttgtggaactgcataagttaaatacagaataatcaagccccacatattagctaagccaattttactcatcatgacagtaattggaatcataattacttggaatggtacgaagataccaatgattagcaagatatacatccaattaaaggctgtatgttttgacatatttctagcaatagagtaagcagccattgggacgaaaatcattactaagacaattgataaaaccgtaatgacaattgagttccagaagtaacccattactccatccgcaaacaatctttgaaagttaactgatgtccatggatttggccaagcaaagaaatgattcataatttgcttagttgtcttaaatgaacttaaaaatgtatagagcaatggaattaaaatcagaattccaccgacaatcagtaaagcataatcccaaaacttctttgatttattttctttttccattttgatactcctctttaatcaacggcatacttgttagaaatcttaatttgaatgaatgaaacaatagcaattaagatgaacaagacaatggcaatcgcattggcgtaaccaaatgagttattgttaaacgcatagttataaaccagcaaaccaagtgaagtagttgagttgttaggaccacccgcagtcattgcaaagatttgatcgaaggctgtcaaacctgactttaatgccaaaataaagaccattgaaatacttggtaacatgtatggcaattcaatgttccagaagatttgacgactattagcaccgtccatctccgcagcttctttaatttcatcgggaatactttgtaaacccgctaaaaagataatgattggcattgccacaccttgccaaagcaaaacgaaaatagttgcaattaccgcaccagtattagtacctaataaacttgtttgaagccattcaatatgaagtgcattaccaattgctggcaaaccataattgaatacttgcttaaaaatcaaagcaactgtcaaacctgacaatacagctgggaagaagaaccaggctctaaagaatgtttgacccttgatctttgagtttaatgctctagctactaaaatacctattacaatttcaccaataatcaatgaaatagttagaattgcagtaaaaccaatggatttagcaaagttttgatccatcaacaataatttatagttattaattcctacaaacttgtagttataagtcaaaccagtccaattagtaaaactgtaaaaagcaccttgaaatagtggaaaatagaagaaaattgcttgtaaaatcaatggaacgattaaaaacaaccaaccccaatgtttttcaataaaactttttgatttcattttttaatcctcctagttagaagccttcattggattgaagaaggtgttcatatcatttaccatttgttgcttattaccagtcatcaggtaactagccgtcaaattgaagaaatcattctcactagtccagtcttgtgctaaccaaaccatatcgtgtttagtgaaagccaaagtagacaagcctcccaattgagaattaattcccctttgctttacacctttaacggctacaggacttccatcaacgttatagtacttttgcattgcagcaggtgttgtcatatatgctacaaacttttctgctgcctttttgtgcttactctttgatgaaatagacaaagctaagtcgcctgaaccaactgtcatttcatgaccagcctttgctgctggaaaagcaaatgttctaaccttaaattttggcttttgttgattgatcataggtaatgcccatgaaccgtttggcataatcaagcttttaccattagcaaatgaaacaacagcatcgttgtaactagcaccacgccaattttgttgtgcattttcacgaagtaagttcaatctagtaaaatctttttgaatataaggattgtttactttaatgccgttaggcgctgagaacctaagtaattggttagcttgcttagcaccacctgtaacagtagctaaagataattggtgatatccgtttaaagtccaaggttcagtaccagctacagcaaatggtgccttgccactagccttgatttttttaacaatttgttcaaatttggcccaagtcttaggagctttaattcctaatctcttaaattcagttgcattatagaagaaaccgtaaacgttggcactaagtagtgcgttgtaaatcttaccgttaattttaaaagaatcagcatagtgatttttaatgtttttaatatatgaagcatgagtcatatcttcaaaataacctgcttttgcccattcctgaaaatcaatattttgtgggtaaatattaattacatcaggaacatctcctgaaagcattcttgtcttcaaaaccgtacctgcattaggaacgtcaacttctttaacatgaatatcaggatttttcttttcaaagtctttgataatttctttcaaagttgctgacatttcttttttctggttaaagtactcaattgtcacttttttaccagaattgctgcttttattttgaccacaagctgtcaaacttaaagccatcgtagcgactaagctaattaaagctattctttttagccactttttcataaattttcactcctcttgatcaaatatcgctctatttaagtaagcgctatcatatttacaattacatcatacacttctatttacagttttcaatggatttacacaaatttacacatttaaataagtcaaaatactatgatataggattttaaatgtgtaatatttacataaggaagtgaaaaaatatggtagttactattaaagatatagctaaagaagcaaacgtttcgatagcaacagtttcaagatatattaatcaaaatggatatgtaggtattgaatctgctcttaaggttaaagaagcaataaaaaaattaggatataaagtaaaaggtaccgtcaactctgtatctaaattaaatttaatcgaggttgattttccaaaaattaataatcctttttattctgaattatttgaatatctagccttttatttacaggaaaaaggatacgattgtattcttcatctagatcactatcaatcccaagatattaattactatttagagcgatttaaacaaaaggaaatcgctggactgatcaccagctctcctattaagattcctaaaaaaggactaaaaataaagtttcctattgttagctttgaccgtaaaattagtcctcaaataccaactgttcaatctaataactatgacgcaggtatgcaaatcgcacaatctgttctaaaacaaaagaaaaagaaaattattattattgctggtgctaaagaagactattacccaataagtgatcgaatcaaaggaatgattcgcgtatttaacacttttgattctaaattcgatcttcgctcactcagtgccagtgactcaattattgctaaaaaaatagccatccttcaatttttaaaggatgacgaatatgatgcaatttgttgtaccgatgacattacagctttactagctaaagaatgtgctgattatttaggaaaagtacctttaatcacaggatttgatggtagtcatttgattcaaagtctttttccaaatttaattagcgctcggcaacatacaaaagaaattgctgaattaatgtgcgatttacttttacgtcaaattaatgatccctctgtttcattagaaagtgtttatacgctacctgttagtttaataaatcaaaattaaaatcaaaaaaacgctagaatgtagcgatctaataatcattacattccagcgtctttttataacatcttatgctttttcattctttgttcgaaaatcccgttaatcaactctgtcatttgttgtttttcttctgcggttggttcaccatcttcaaaagccttgtataaatcgggatgttctctagcgattaacttgcaagtgccttcaacagcatgcttgcgaaaaatttttggaatcttgtttagatattcttccttgactaaagcaataatcttttcgtttgtcatcatttttactatacctttcagttgatttctaaatattttaaatattaatatagatttacttgtaaaatcaaatcataatatccaaaagaaggaaacatccctaccacttcattcagtaaggatgttctccatatttttattcaaatttccaatcaacagtccgcttaaatttttcacctggcaaaagcgtgatgcgtcccaaatcatcaccttctgctggcggcacttgagcttcaaacgtaatcccacaatatggaccaaaatcagccgtatatttaccagtatgatcaaatccatttcctgtataaagaatcaaggatggagcattagtcgttaccgttaacttgtgtttagcagaagttagcactgcatttggcatattgccatccaggataaatggatgatccattccatcgcggttcttaatttgcggatcatcagcttccaatgcatccccaactcgcttcttctttctaaaatcgaatgctgttccatcaactttttccataccacgatcaggcaagccagtctcatcaactggaatataataatcagcattcatttgcagttgcaagtcattaatcattttcttttcacctaaagtgaagaaagtatggttaaccggattaaaaatagtcagcttatcactcatggcacccaatgaataatgcagaatattgttattatctaactcataacgagcgtgtaattttaaattaccaggataatcattatgcccatctggatcaaaaagtgttaaatcaacacgagcacctttttcattacaactaggtctaaaatcccaaatttcagtatcagtcccaataccaccatgaatgtggttaggcccttcattgattggtaattgatgtaattctaagccgtgccgccataaacctcgtctcactcttccggcaatacgtccaaccgtaccgcctagataattacgctccttgtcgtaatcttctggcttatccagtgacaaaatcatattctcaccatcaagcaacaccttttccaatgtagcaccatagttcaataccttaactaccataccgtgatcattctctagtgtgatttcacaaagatctttattatcttttctgccatattttctaaaacttgtcttcatactcttgcccttcttttgtgagactgtaaaatagtttgtgtaaggatgaatgattccttaaatttatttctttaaacattagaaaaaggagttcctttctcgtatgattggtttgaacaaaaaaacacatacagaaagaagaactccttcatgaatgattttaccaaagattttgctcaagctctattcaatccagacaaaataaatgatttattgcgcaaagagctacaacaggctgttaataacttgttagaagctgaattgactgcctttctgggctatgatccctatgccagaaatggctggaatactggcaactctagaaatggtgcttatttccgcaaagttgatacgcaatttggcccaattgaagtgcaagtgcctcgggatcgcaacggtcaatttcatcagcacacgctgcctgactacaagcagcactcggatatcttggaaagcatgattatcaagctttactccaagggcgtgaccaccagggaaatagccgatctaattgaaaagatgtatggcagccattacagtccagctcaggtatcaaatatttccaagcagatgattccaaaggttgaggcttaccacaaacgcaagctaagcgacaagtttttctgcgtctatttggatgcgacataccttcctttgcgccgagaaacatttgagcgtgaagcagtctatattgccattggcatcaagcctaatgggcacaaggaggtcattgactactgcattgcacctagcgagaacattgaagtctggacagatatgcttcaaaacatgaaatcccgaggcttaaagcaagttgagctttttctttctgatggtgttgttggcatgaaaacagccttggccaggacttatcctaaagctcattttcaacgctgtttggttcatgtcatgcgcaatatctgcgctaaagtacgcgtcgacgatcgtgaaaagatcatgaacgaattcaaacaggtgcatcaacagacaaacaaagaagaagccacagctgtcctgcatgacttctataccaaatggggcaaggtttacagccatgttatcagaagcttgaaagacatagaaccagatctgctggtcttttataactatcccaagcagatcagagcttcaatttattcgactaacatgattgaatcatttaacaatgtgatcaagcgcaaagctaagcctaaggcagagtttccaactgaacagtcgcttgatgcttttattggcattcaggcaatgagctacaatgaccgttatttcaatcgaattcataaaggctttggtcaggttcaggacaccttagaatcctactttgattaaataaataattaaaaaatcaatttacgagaaagatctatttacacaaaagatttgacagtttctcttttgtattcgctttcataaatattataaattatttaaccatcagaatatatgagttaccgctaacaaaaaaaacgagatccaacagatctcgttttacacattgatgagttaaatctgcctagttaaagcggtaatgaacttatcccagccttcatcgccatctgcattattcttgaaaacaccggcatcttgcaatacttgttcaaagacttcaactaaagcttgctgcatcacagcgtcaacattctcggcagtaatattctgctctgctttaatttgatcggcccattctttgtggctaatagccatcttattatcttggcccaaccagtattttttaacttcttcaagttcactctttaaccgacctggcaaaatagcacggcccattacttcgatcaagccaatattttcctttttaatatgccacaattctttatgtgggtggaaaatacctaacggataattttcactagtgttgttgtcacgcaaaactagatcaagtacgaagttcttgccttcacggtgcataattggagtcacagtatgatgacgtgttttaccatcaaaagccttaatttgacgagcagaatctgaataatgatcccagaaattaataattttagcgcccaattcaatcaaatctaacgaattatcgctaatcaagcgcaagtcgctcattggccaatcgacaatgccagcaaccacttcaggataatcatcaaagactacatttttcttaatcttagctttcatcattggaaaagtatgacgtccgccttgatagtgttcatgtgctaacattgacccaccaacaattggcaagtcagcatttgaaccaacaaaataatgtggtaacgtcttttcaatttcaaccaaattaatcaaagtttgttggttgatgaccattggaatatgcttttgatctaagaaaatacaatgttcattgaagtaagcatatggtgaatactgaaatccccaagggcggccaccaatattcatgcgaataattctcaaatttgaacgagcatttttgccatatccaccaaggtaaccctcgttttctaggcaaagtgcacattgaggatatttcttaccagttgcatgagctgctgccgcaattgccttaggatccttttccggtttagacaaattaattgtaatttctaagccatgtcctttagagctggtccctgagaatacaacatttttggcaattgcttcctttttgacataattgttgttttcgcaaagtttataaaaccaatctgttgctttttcaggtgatttttgcattttttgccaaaagatgccattagttttagatggtgttggcgttatcaagtcgtatagttgatcattcaaaacttcacgtgaagtaacatcatccgaaatctttttattttgcacggctaaatcaactaattgcttaactgaagtttgttcatcattagcttcaacgctacttgcctcatcgccaactaaagcgcgaattttgttaatcacatatacgcgatcgagcggctcatacgctccactattaataacttcatccgcaaatttttcaataactttcatacttatcctcttgtttgattaaattctcttagttccatcaacaatttccgcatcatagaagctggcatcgtaaccgatcttgtcgcggtaaatcttgccaacatttttcttaaatgcctcagcttggtctttcttgacgattgcaatggcactaccaccgaagccaccgccaatcattcttgcacccaagacgccaggttgagcccatgaagcttcagctaaagtatctagttcttgaccagttacttcataatcgtaatgaagtgaaacgtgtgaagcatcaatcaaacgtcccaatttttccaaatctccatcttgcatggcctttgttgcccgcaaagttctttggttttcactaacagcatgacgagcacgcttaatttcagtttcattattaatcagatatgcatattcatcaaaagtatcattatcaagctcacctaaagtcttaatatctaacttagcctgcaacttcttcactgcatcatgacattcacgaacacgatcattataagcagaatcggctaaggtatgtggcttgttagttgccataataataatttcgtaatcgcctaaagcgagtggcttatactcataatctaatgtattgcaatcgaggaagatagcactatcttttttacccataatgcaggcaaattgatccataatccctgaattcaagccaacaaattcattctctgttctttgacccatcttggctaaagcaatccggtcaacatctaagttaaattcatcctttaaaatgatgcccattagcatttcaatggcagcacttgatgatagccctgaacctgatggtaaattggctttgatataaagattaaaaccatgatcaatgttgtcatatttttcacgtaagtacgtaatcatgcccttgaagtagttagcccaaaagcgatcatctttctcaacagttgtgtcgtcaatatcgaattccacgatatcgccatcaacattgccagaaaacaagcaaacttttttatcctctcttgggccgtaaacaccataaacacccaaactaattgcagctgggaaaacatgaccaccattgtagtcagtgtgttcaccgatcacgttgattcgaccaggtgagaaaaagacatccttacctttttcaccaaaagttgtctcatattctttaagtaattcttccttattcattgtttttacctcaaatttattctgtaatcgttttcagttattagtatatctcttcagtatcttttagtaaatagtttacttaaataaataaaatatttatttaagtaaaaaaacaagaagctagatcgtttgtctaacttcttgtcttcattaaggaaaaaatcatttatttaacaagtatttgtacatcccatgccttcatttgatcatgagcttgctgaccagttaaaatattttgatactctacaaatttttgtggcaattttctttcttcattactcatatttaaaacaaagtataattcttgcccagactgagtaactcgcttagtaacttctaacttatgactgtcgcccaccaatgattcaacgttagctgtcaaaacaatatggttgaatagctgcgtcaacccaatgtgatccaacttagtaccaacataccaggccttaccttgaccatatttattttccgtgactgcagccgttcctgcataaaactcattggagtactttgctaaaacttttgcattttctggatgaatcaagtcacaaaccaaacccgctttataatccttgccatttagtgaaacaattgtcttatgtcctggtacaattgcatcactttcttcaacccaaatacccataacgtcttttaacgggccaggatagccaccaagatagacattatcactattgttaaccattccagacatataggtagtgacaaagttgccaccatttttgacataagcattaatttttttgcttagccctgctttaaccatatataaaacaggagcaactactaaatcatattgactaaaatcatcatcgacactaattacatctgtcggaatattgcgttcataaaattggcgataataatctaagattgattccatataattaaaatcttgactaataccgtcaacgtactcatatgaccagaagttatcccaatcaaatacaatagcagctctagccttagttttagagcctaaaacagttgggccaatcttttttaattttttacccaaatcttctagttcatgaaagaccctcgtgtcggttctttgtgagtgggcaattacggcactatggaacttttctgagccgcctactgcttgttttaattggaaaaactgaaccgtatctgcaccatgagcaactgcttgcaattccgtggctgccatctgccctggtcttttcagcgggctatatggttgccaattgacttgagacggtgcagattccatcaacataaatggctgatgctttaaactacgcattaagtcatacaaaaatgctggtaaatacttaggtgcatcgtaggttgggtaagaatcataagaaataatatcttgatctttagcccatttttgataatcaaccatcttatttggtaaaccatggaaattagtagttacaggagtgttagtatcatactttttaataattgatttttccatctgaaaaagattttgtaaactatcagattgaaaacgtaaataatcaattgataaaccggcaacaatggtttcgctaccttctggtccccaggcgtctcctaactcattaggaacaacaatctgatcccaatcatgaatagtatggctccacacattcatattccaggcctcattcaggttatctagtgtttgatatttactcttgagccaagtacgaaaagcattttgacaattttcacagtagcaattgccgccatattcattattcacatgccaaacagcaatatgaggtttattactatatctttcggcaattttctcgactaatttactagctaaaacttgataattcttactattggggcaaaagttatgtcgtgcgccaaagacatgccgccgtccttgataatcaactcgcgctacgtcagggtattttttaaacatccaagctggcatcgcagcagtagaagtagcaagtacaatatcaaaatttgcatcagacaattcttgaataattctatctaattttgaaaaatcatattggccttctcttgactcaagcaaactccaagaaaaaacattaattgtagcagaatttaaatccgcttttttaaaaactttaatatcttctgaccaagtgtcttctggccattgatctgggttatagtccccaccatataaaaaacgttttaactgtgtcattgtaattcctctacttaaattgtacatctaatactttttcaccatgctcaacaatcttaccagcttcaatttcactagattttacaattcgtcctggttgtgtatagaaggtaactacagtgtcctgatagccattcttaagagctaaattacgatcaaactctaacagcaagtcacctttttttaccttttgaccatcatcataataagtttcaaaaccttcaccgcgcaagttaactgtacctaagccgacatgaacaactacttgtaaaccattatttgaaacaatttcaaaagcatgcttagtaccaaaagtgaacctaactacaccatcaaatggagcataaatattgcctgaatctggtttaattgcaaaaccctttcctgggaatggcttaccatcttcgtcaattacttctgccatcttcattaacttaccgtctgcaggagcatagatagtctgatcttgaggtctaacttgagtattagattcattcttttcaatcttaccttctgcaagttgatcttttaattcttcaaccacttcggcatgtttcttttcagataaagttaccttagtcaaaaagactacgattgataagactgccaaagcaagtgggatatataatgccaccatattaaaggtgctaatatcatgagcagtcatgtctgcagcagttgcagaaccggtcatcccagcagcaattgcaatataaccaactaaagcattagaaaccgcaccggtaaacttatcaatcatcggccgaacagctaaaacaacagcttcatttctttgaccattcttaagttgtccatattcaattgcgtcagttaatgttaaaacagttaccaattgagcaaagttaatgtttaaaagaaccaagcccaagtccatcaaaaatacgttgtctctgccgaaaataaacaaaacataagctaaaaccatgcaagtttgtccagcgatgaataaccattttcttggaatgtatttgttcagaattgggaacattggactaatacagaaaccgataattgttgcaataacaccaactacccagaagtcatttggcttaccaataacgaatttatacatatagaacaaaacaccattggtaattacatatgctaatgagtaaagcaagtatgctaaacttggccataaaatttggtcattatgaaaaattgctccaaacacttgacctaagctagtcttttgcttagctgagtttctaataatattatgcttttctttagtaccgaaacaaacaatcaaggcacatacaattgccaaagctgaaattactgccgcaaatgctaaccaacctggtgcaccttcctcatgtttaccagttaccgcataagtcacagctgtaactaatggaacaacaataattgttaatccgttccaaccaattgttcctgaaaaggcacctaaagaagtataaataccacgtgcatgtgaatcttcacttaaagctggtaccatgccccaataagaaacatcagataatgaataaaatacatcaaaactgatataaattagtacaaataaaatcgcaaagagaatccaacttttttgtgctaatccaaaaatgccagtaaacaaaactaataataaggcggcacttactaaagtaccaattaaaatccaaggtttgaatttgccccatctagttttagtattatcaactatatttcctagaataggatcaattaccaattcagcaattctaattacaaccatcaatcctgtaattaagccgatcagcttatctgcaacggactgattaagtccgctgaacatgctgctagtaataaaaataataaaatatgtactcatcacaccataaaaagccgagtgacctaagttacccaaacagaatgatgcgtaggaaagaatctgcttccctgacttgtcactgtgtgtcataaatttgccccctaaagcaatcattaattgtaatcgtttacacagtttagtatattctctatttttgttaagtaaagaatttatttatatttaataaattctttactgaaagctaaacaaaaagagaacgcattaaattagcattctcttttgatagtattactaaaaaatatttttatttactaattaatttacttcttaggcacaaaactcttgcgcacaactaaattagtattcatatttacatcaatgtgtgcccgattaggttgaataatcagattcgttagcatatttaatgccatatcaatcatctcttgttgatcaatattataagaagaaagtggcggtgaaacatacttaaccacattactattattaatacttaaaattgcagtatcttttggcacattaacattgttctcattaaaagcttgcaaaactccaactgccaaagtatccgaagcaattaaaaatgcatcaggcaatttatttttgcatttagccagtacctcttttcccaacttatagccattagcaacgctaaacgggccattaacaaacatcaattcatcacttttgcctctcaccttgatatactccgcaaaagcggtggcacgtacatctacttcttgaatatgatcatgcttaggcccaatgccacctataaaaccaatgcgctgatatcctttatcaagaaaaagatcaattgcattttttactgtcagcgttaaatttgggcgaatggaatcaaataattccggggctggattagtatcgacaaagaccccattaggcaaaacctcatggagtttttttagtgttgcattttcaattggcgccgcgccaactccgataaagccctgaaaaagtgatgcatgtttaatcaaatcatctgcatcataaaaagtcttcatctgcagcgactctgcttctactgttgaaatcagcgcttgctttaatgaagtaaaatattcatcttgcagttgctcttcatgatttactcggtatagtaacgcaattgttggacggatcttcttttcctgatgatccttccaatagcccaatttattggcaatttctaaaatcttgttcttagtatcagccgtaattgacaaattaggatcattatttaataagcgcgaaaccgtagctgaagaataccctgattcttgtgctatttctttaattgttgtcatatttatatcttttctatcttaaataaataatttttaactttattatacaaaatatttacgtaattccaataaatatcataagcactttgtcattcgttttcgagtcaaaaatattaatcttcaaaatatttttcagtaaataatttacttattaagtaaatttattatctatgtgttataatataagcgttttcaaggttaatttttttatagaaatcaggtattttcatgaaagcaaatcttagctggcttgatgaccccgaagttttccgcgttaatcaagttcctgcccacagcgatcatccctatttcaagaactatcgcgaatggcaaaagcaaactagtagttttgttcaaagtttaaatggtgactggtgttttaagttttcagctaatccacaaacacgacccgttgatttctttaaaacagatttcgattcttcatcatttgatcacattccagtcccaagtgaaattgagctaaataattacgctcaaaatcaatatattaatacgctctttccgtgggaaggaaaaatttatcgtcgacctgcttacacaatcaaccaaaaagctaccgactcttttagcaaaggtgcagataacacagttggctcttacattaagcattttgacttaaattccactttgcgaggtcgtgatgttcacattgtttttgaaggagttgagcgagcaatgtatgtttggctcaatggtcattttgttggttacgccgaagatagtttcactccttcagaatttgatctaacaccttacattaaaaacaaaaacaatattttagcagttgaagttttcaaacatagcactgcctctttcttggaagaccaggatatgttccgtttttctggcatttttcgttcagttgaattgctcggcctacctgagacgcatttaaccgatctcgatttaaaaccagaagttacaaataattaccaagatacgcgtggtgctagttaaatcgttctagacaatatgccatattataagctaaaatggcaacttcgagtctctcttgaaaatctgctaaacttctagctcgattattttcagcgttgtagtaagacaaaagcgaaaaatcactctcgatggtccttctgagtgccattaaatagtgcttattgtgcttttgagcattcttcatgtttttacgatatggtgtccaaagcgtatagcccatttgctctaagcgttgatgcaggtttttgcccaaatatccttcatcgcccaaaaggtaacgattgtcaggatgagcgttagtaatcagttctactgtttccttagcatcatgaactgaggccttggttacgatataatctagcaagtagccgtcgtcgctaacaatagcgtgaaccttaaaaccataataatagatttttttggttgccttatagctaatatcggcatagccgcgaaagatcttggctcgacgattgcgaattggctgacagactggcacaggaaagctatcaataatcaaaatgtcgcctgacagatctacttcctcattaaggccatgtcgaattaaatagatcaatggcaaaagcatgcgtgctctgcgattaaagcgagagtgagataaattaacaagcttttcacaaaatcttctttgagattcaacgcccaataaagcctgccaaataagcaaggccagaatagaactgtcagatattttacatcgattgatattccgtctttgctttaatgcatctggggcataaagtttgtacaaacagcgataaattatatttaaacaactaaaactaacttgtgttaggatgagaaaaacgcttaagcttagggtagttcaatctagtcagactcttttctattaatatgtttacaagtcgagtctaacaagattggactttttttgttaactaaaacaatttaactagcaccacgcgtaccaagatggaatctttaatgctcaattgcactttacaggcaaaaatactggctcagttcacttgttcgtagaagatattaatggcaaaactctacttgagaaaaaagcaccaatcagcttaaccataaaaattgaaaaagaattattcaaaaatgtgcatctttgggataaccatgacccatatttgtaccaactaattattgaagttcacgctgaaaatggtgatttacttgaactaattccttaccaattcggctttagaaaaatcgaaattaattctgacaaggttgttttattaaatggtcaacgtctaattattaatggggtcaatcggcatgaatggaatatgaagcgtggccgcagcatcactttaactgatatgaaacaagatatacatgcttttaaagaaaataacatcaatgcggttagaacttgccattatcctaatcagattccgtggtactatctctgcgatcaaaatggaatctatgtcatggctgaaaataatctcgaatcacatggtacttggcaaaagatgggacaagttgaaccttcagataatgttcccggttctattcctgaatggcgtgaagctgtaattgaccgtgcccgcaacaattatgaaactttaaaaaaccataccgccattctcttctggtctcttggcaatgaatcatatgccggagaaaacattgcggctatgaataaattttataaagcacacgatcatagtcgcctgacccactatgaaggcgtggttcatacgccagaattaaaggacaagatttctgatcttgaaagctggatgtatttaccaccaaaagatgttgaagaatatcttaaaaataagcctcaaaagccatttttagaatgcgaatatatgcatgatatgggtaattctgatggtggcatgggttcctacattaaattgcttgaccaatacccacaatatttaggcggctttatttgggacttcatcgaccaagcgctattagtacacgatccggtgagtggccaagaagtattacggtatggcggcgactttgacgaccgacactctgattatgaattttcaggcgatggcttaatgttcgccgatcgtacaccaaaaccagcaatgcaggaggttaaatactactatggcttacacaaataatttacatataatctatggggatgctactttaggcattaataccccagataagcaatatattttcagctatgaaaaaggtggcttagagtctttaaaaattaagggtaaagaatggttttatcgcgttcctaccccaaccttttggcgtgcaactactgataacgatcgcggcaacggtttcaacttaaaagcagctcaatggctcggcgccgatatgtttagccactgtactgaaattcagctcaaagttgatcaacatgattttgcagatttgccaatcgctccgctcaacaaccaattttctaatcatgagtacgcaagtaaagtcgaaattacttttatttatgaaactttaactattccaaaaacaaaagttgaaattacttaccaaattaacaataatggtcatgttacaattaagatgcgttattttggtaaaaaagatttaccaccgcttccagtaattggaatgcgctttatcataccaactctagctagtggctttgaatatgaaggcttatctggtgagacttatcctgatcggatggctggagccagtgctggctcttttaaaattaagggattgccagtaaccaaatacctagtgccacaggaaaatgggatgcacatgcaaacgcataaactcaaaatcactagaaatactacgctcaacaatgctgatcattctaatgaggattttgacctcaccgttgagcaaactgataagccattcaacttcagttgccttccctacacagcagaagaactagaaaatgcaacgcatattgaagaattgcctcttgcccggagaacagttttagtaatcgcaggtgccgttcgcggtgtaggtggcatcgatagctggggtacagatgttgaagatcaatatcaaatcgacccaagtcaagatcatgaattttcatttagactaaattagtgtttttaaataatttatctaaaataagtaaattatttactaaaatatgtgttataatgtaatcgatttcaataaaagataataactaaaataaaggagcgcaaaacatgaaagttttagttgtcggtggtgcgggttatatcggctcacacgctgtacgcgaattagttaaagaaggcaatgatgttgttgtcttagatgctttatatactggtcacagaaaggctgtagatcctaaggctaagttttaccaaggcgatattgaagatacttttttggtaagcaaaattttacgtgatgaaaagattgatgctgtaatgcactttgcagcatattcattagttccagagtcagttaaaaagccacttaagtactatgacaataacgttactggcatgatttcattattacaagctatgaatgacgctggtgttaaatacttagtcttctcttcaagtgctgcaacttatggtattcctaagaaattgccaatcaccgaagacaccccacttgatccaatcaacccatatggtgaaaccaagatgatgatggaaaagatcatggcttgggctgataaagctgatggtattaagtacactgctcttcgctacttcaacgttgctggtgctgcaagtgatggcacaatcggtgaagatcacgcaccagaaacacacttgattccaaatattttgaagagtgcaatttctggggatggtaagtttactatctttggtgatgactatgacactaaggacggtaccaacgttcgtgactacgttcaagttgaagatttaattgatgctcatattttggcactgaaacatatgatggagactaataagtcagatgtctttaacttgggtactgctcaaggttactccaaccttgaaattttgaacgctgctaaaaaagtaacagggattgatattccttacacaatgggtccacgtcgtggcggtgaccctgactctttggttgctgattcaaccaaagcaagaactattttgggctggaagccaaagcatgaaagtgttgatgacgttatcgcaactgcttggaactggcacaagagtcacccaaagggctacgaagacaagtaaagtataataaagatttctataaaaactaatcgtttttcaaactattttctacatctattatctaaaaaaatgacgctggttcgatcaactagcgtcatttttgattgaaattatttttcaaactctaatttagttagccaagtttgaactgcctgaataacttgagtaaaagtgattcccttagcaaaaggatgttttctcacgtatctattccaaagattctgcatattactattttcagcaataatatctacttgtcttagacaatacttataatctatatcttgtcctgtccaaaagattgattcacggtaattcgtagtattagcaaaagctgactttaaagtagctaaattgattcgttctctctgcagtatgaataaatcatagagatctttcatacgtgtattagctattcctctcgtaattaccgtttctaatttttccgctactatagtttccatagtatatgcccaaatattaatatgtcgatcttctaaatgtaatttatagctatattcaatctccctaggtgtaataacatcccctgttgaaacatctacttttaatggatatcttatcttccgaaaagaagcattaaaatgtaatcgatagcccttgtactcttcatgctcatgaatctgttcaatttctgacaacgaaatgcttaatagatcccccgctaattttatttgacagatttcttcaaatactttagctaattgtttttcggtcaaatctaatccttttatctcagcatcaatgtcttccgtggatcttttatcgataccaacaatagccgacaacaaaaaaccaccttttaaaatgaaattatctcgatattttgatactgaaattctttctagcaaatcatctaacataatttcttgccataatcgaccaatctcatttccttttatattatgctctctagcataccttcttacatctgctttgaactgcttctcatcaacataatttttcacaacaacacctctaagtagctatttacctttctagttaccctaaacttttctgcaaaagacattaatgtatttatgtcttttttcttttccttattccacatcttgaaggcattggtaattatttcgatatctacagcattaatcggtcgcaatatttcagctagagttctttcaggagtatagagattaatcacatttccattgaatgattcagtttgagttattccctgagtagccaaacttttagtttgaatatgtggatttatttcaatatccaaagttggattattgtagcccctaggaaaagtcatatctaagctaaaaggatattgatcacttaacccccataaatataatgctgtttctaaagaatagattccttttttatatttttgttgcaaactataaaatatatcctcggtatcatcaccaaataaataaattcccggacgtattttttctaacgtaccatcctgaacagctttcgaaatactataacttgatactccatttaatgctaattcacgatgagtaattgtaccgttatgtatttttgctagttgactaatcaatgatttttgtttcataagtactgtcaatatacgaatatggaattatattacctacaattgaaaaatatatttctcctttcattatttcgaacataagtttaatgaattacaaatataaaaacaagcgaacaaattattaagattttattatttccatattcttctttttcaattgcttttttacttattttactacactttactatgtagtgtagtaaaataagtaaatttagtgtccataaagtaagtaacattgattcaatatgacttactttatggacactaaactattatcctcaagttcggtatacaccagtttcttgctaaaagttgtataatgtaaacagtaaacaaacaaggagcatctttatggcaagtattagagacattgcacgtattgctggggtatcgccagctagcgtatcacgaattttaaacaatgatccaacttttagaatcaatgaggctagtcgtgcccgcgttatcgaaaccgccaaacgcctgcattattcgaaatctcaaaaacatcctggtcccaagcaaactgataaccagctctcgattgcactaatcatgcgttataacaaatctcgtgaaatcaccgatccctattttctcaatctgcataaaggcattaatgaagaagccaagaaatggcatttacgtattgagcaaccttttagaatagaagatgataataaaaattgggctgacttagctaaatttggcgcagtgctaatcgagggtgaaatgacacctgtagcaattaagcagattcaaagcattaatccccatataatttttatcgacgtcaacaccaatattcataattgtaatatcgttcgtaatgattttgtggaagaaacttctcatattcttgataccctctataacctgggacacaagaacattgtttacatcggtggaaaatcattggttcttgatcttgacggtaagattgcttgtgaaaaaaatgatctacgtgaactcacttacttgtcctggatgaaactccacaatcttgaccagtactgccattcttttattactgattggtcaactaactctgcttttgaagctggaaaagagatcttaaaactgcaacaacgtcctactgctgttgttgtcggtagtgatcctatggcattaggtgtttataaagcctttagtgatgcaggtgttaacatccctgacgatatctctgttgttagttttgatgatgtagatatcaatcgcttcttaactcctaccctatccagtgtctatatgaatactgaagaaatgggcaagactgccgttcgtttggctaaagatctaattacggaagatattcaaattccacttacgatcacttgccatagtcaattaaatatccgtgactctatttctaagaaaaaataatataaaagaaaagcctcgaaagcactgtactgagacgtaaaaagtagacaattaaaatattggattaatagaggcttgacttcgatactctttcggggttaagccttttaatctgctctttatcctttcgttgttatagtattcgatatattcctcgattgcttgagttaattcttgaagattatgatacttgtattcttgatcatagaacatttcagttttgagcaggccaaagaagttctccattagcccatcatccatggagttgctctttctggacatgctttgagtaataccatggagttttaaagctcgctgataacgagggctttgatactgacagccctgatcagtatcaaaaatgcagttattaagagctgtttctttggcaaaagccttgtcaagcattgtcattactaaatccatatctggatgtttggagatagtataagaaactatatcgccaccgcagccgtctagaataggcgataaataaagcttttcattattaagatgaaattcagtgatatcagtataccattttgtgttaggcagggctgcgaagaaatcacgatgaattaaatttggagctattttgccaatagtacctttatagcttgaatatttgcgcttattgcacctgatgcctttaagacctaatttatgcatccaatagcgaacggttttctccgtaactttccagccctctctgattaactgcaaagctactctgcgatatccatagcggccttgatgatgattaaaaatctcatggattctagcaataagctttgaccgtttaggcttgacgggctgtcgtttgataatcttgtagtatgagcttctggcaattataggtagctcagggtgctctgcaatcgcagctaatacataatttaaactaactttgaattcttgccttagatccgtaatcaccctagctatttcttctgatcttcttgatccaaggcacttagtttttttacgtattcgttcacaatacgcaatcgcaagttttcttctttcagctgctggatctctttctccagttccttgcgagatttctgcttttctttggtcacgggcagggcgtcctttctgtttgataatgacattatacccgtttttcttatattctctaatccaattgttaagcatgccaatacttttaaaccccagttccaaaggcagctgtaagtatggtttattgccaaagattgcttgttcaatagttcgctgcttaaactctttggagagactgtaaaatagtttgtgtaaggatgaatgattccttaaatttatttctttaaacattagaaaaaggagttcctttctcgtatgattggtttgaacaaaaaaacacatacagaaagaagaactccttcatgaatgattttaccaaagattttgctcaagctctattcaatccagacaaaataaatgatttattgcgcaaagagctacaacaggctgttaataacttgctagaagctgagttgactgcctttctaggctatgatccctatgccagaaatggctggaatactggcaattctagaaatggtgcttatttccgcaaggttgatacccagtttggaccaattgaagtgcaagtgcctcgagaccgcaacggtcagtttcatcagcacacgctgcctgactacaagcagcactctgatgttttggaaagcacgattatcaagctctactccaaaggcgtaactaccagagaaatcgctgacttgattgagaaaatgtatggcagtcattatagtccagctcaagtatcaaatatttccaagcagatgctccccaaggttgaggcttatcacaagcgcaagctaagcgacaagtttttctgtgtctatttggatgcgacataccttcctttgcgccgagaaacgtttgagcgtgaagcagtatatattgccattggcattaaacctaatggacataaggaagtcattgactactgcattgctcctagtgagaacattgaagtctggacagagatgcttcaaaacatgaagtccagaggcttgaagcaagttgaactctttctttctgatggtgttgttggcatgaaaacagccttggccaggacttatcctaaagctcattttcaacgctgcctggttcatgtcatgcgcaatatctgtgctaaagtccgggtggatgaccgcgaaaagatcatgaacgaattcaagcagatacatcaacagacaagccaaaaagaagctgcagctgtcttgcacaaattctatgccagatggaataaagcttatagcaatgtcatcaaaggtttgaaggaaattgagcccgatctgctggtcttctacaattatcccaaacaaatcagagcttcaatttattcaaccaatatgattgaatcctttaacaacgtcatcaagcgtaaagctaagcctaaggcagaatttccaactgaacagtcgcttgatgcatttattggcatccaggcaatgagctacaatgaccgctatttcaaccgaattcataaaggctttggtcaggttcaggataccttagaatcttattttgaataaataattcaaaaatcaatttacgagaaagaactatttacacaaaagatttgacaggttcaataaatctagttcatgagcttgttttgttatactttaaatttaactttgagccattttaattatttaattaacttttctatccagctaaattccaaggaattcctttaatatccttgactattcgtagaaaaccaaaataagcactgatgttaaattcatcagtacttacaattgtagagtccctttgttcaacccgtattgataacgactgcttacaataataaaattaagaccactagaataacagcttatggttttcgcaactttgatcattcccgtatccgaagtctactagctctcaaatctcatggtaaaaactaagctaaaagaaaaggtcagctcaagcagcttcgctacttaaactaacctcatcaaaatacctcatcagtactgacaaagggataaaattgtagagctaatttgattacttacgcttcttgtttacagcagcaaggccaaacattcccaataaggtggaggcacctaagcccattaatgttaagctattgtcattaccagtttgtggtagttggttatccttagctgtcgttggttgagacgtaatcgtccgcttaacagtcttgttcagatctttcttatcaacaccctttggatagttcttgccaggattgtctggaagcttatcgcttggtgtcttcggatcggttggtgttaccgtgatgatcttatgttcaaccttaaccgtaactgtttgaatgccgtctggagtagcggtgatctttgttggaatctttggatcaggaacaatctgccaacctgcaggaacgtttggtgtaactggaatctcttcatccgtctttcctgttaatggggtagtaccaacttctttgccgtttggatcaacgtatgtgatcttcccagtctgttcggttggcgtgtaggtaatttcaatttttggatctgtgtaatcaaccgttacctgatcaactgcagggacttctgcttgacttggagtgtaacctggaatttctggtgcattatacttatcaagctttgaggttgtccatttgccatacgtaacttggcctgtaacctcgtcaacagtagccgtccgagttagagtagtctcttgactagcatcaacagttgagccagctggtttattaacagtaatcgtccgcttaacagtcttgttcagatctttcttatcaacaccctttggatagttcttgccaggattgtctggaagcttatcgcttggtgtcttcggatcggttggtgttaccgtgatgatcttatgttcaaccttaaccgtaatcggggtatagtcgataacaactgtttgtggtgattcagtgtagatgtaaaacttttctttacctaatcctgctccaggagtagtcttttttgcattaatatgataagaatagcctggaatatcaatatcattaatggaaaaagctggtaattctatgctaatatcattcttattaactgatataaatttctcatagttctctttatcctgttgagtaagaaatgtattcttatctacttgaaaaaaagtttttggtaaaacgtttttctccaaaattgatatttttggcaatggattattggatgtatttacttcagcaataacttgaggtttataattataaatactcgatctagtagatgtgtgcgatcgatgctgatgctttctcccttttaagcagctaacattcaaagtcatagttacagtttcaacaccggtaggtttgtttaatattactgttctaattacatcgttattatctgaatttctaaattcaaaactctttactttttttgtatataaagagtaatcaaatctcgacaaatcagcagtcttggaattttccacatttagtgtagaagaatttttagtagaatttgttacttcagttttatccaacatctgattatttactttgcaattttcagtttgcatttgtttagactgaaaagcaccggttggaattttaactttatcatttattatattggtgccattacccgatccggctaattgttgattgttattatccctcaaattcgtatcagccataacataggagttgtccactcccaagtataaggtaatacctatggtaacagaaataagaccaatagataacttacgaagtgaaaaatgatcttgttttggttttaactttaccagacggccgtaataattctttgctgataacatagtatctccctttttatatttactctcagttggaaacattgtataaaaaatcaaccataaacagtattcttaaaagattagaaatcaatccccattacttatatttatataaagtttattccatcctattataatgatatatcattcaaaattccgaagctaattaaagcatcgcgtcttgattagcttcggaatggttggtaggtaatcatattagccttgatgtttattaatgccaagaacagctaagcaactggttaacaggcttacaataatcccggcaacggttgttaagctattgtcattaccagtttgtggtagttggttatccttagctgtcgttggttgaaacgtaatcgtcttcccagtttgcatgttaggaacattaccttctagtttgccagtaacagcatttccattaggagtagtgtttgtaggcgtattagtagctggtgttccttgtccttgatgatcattagttgttggttgaccgccattagttgggatcaaccaacaactaatgatttgattagggttaccatccttgaaggtgtaaaatgttggaacactttcaccaggaactaattgataaccatcaggaatgtgaatattaactggaactgtctgaccagacttgccaggattgtccggaagcttatcgcttggtgtctttggatcagttgttgttgtctctggcgttttgggatcagttggatctgtgtccttagtgtaaacaaaagttgtggtgtattggtatacagtatactggccactcgttactccaagagtacgaacaagacgataacctttaattttcttaggttggacttgccatggaccatttgcataccagcctttttgcggattaaccccattatttttttggttaggattatctaggttgaacgcaagcgtatcattattcctaagcacatttccttgctcatcaatgtacctcacagttactggtttgtttggtagcaagtaaacatgtatccccttagcgtaccaattgaaataatcagaattaagatatgtccctgtacttcctatataggagtaaccttgtttttcgtaatggctaatctcctcactcatttttttctcataattaccattgtttaggtcaatccttttgccatagctaccagcaatcgtaaagaatttgtacggtagatttgtttcttctggaacaagtaacaattcagtcctattactatcagaattattttttataaccttcttatacttgaaagttaaataaacatagttaggatcagctaacgaatttcgagtttgaccagtgattttaccctttaaaacaggttcagaaactaatttatatccaggaatattaatggctgcggcttcatagcgtgatgcatccggtgctttcttatcaccagcacggtgttgtggagattcaggggccatccagaaactatctagaacgattgatgctaaaatatgcccgttatctacatcaacatactctactttgattggtgacaatgatgcgtaatctaaattaatgttaatgtcttgcgtagtaatacctttcttaaggcaggcattaccttgtttatcaaaatagaaatacttattcaaaacttctgaattcattaatttataaccggccacagtaaattcttgatccacactatcccctggtcgaattgtggtctgcttgaaaggttgtttgaatacataatgaccattactaatcacttgaattggcttatgtagggtgacatcgcgaaaattcatagtaatgttgtacttactgggcagtggttgttttgctgtgtttgttgtacttactgggcagtggttgttttgctgtgttttatggattatcggcatttgttgcgctggcgttgttgttttatttggaactaatgttgatgaagtttgatgaacaaccgtatttgattcgtcgctaatccgaatattgcttgaatgggcactaacttgtggatcagtcacttgagtcgtgaatgtattttgagcagcaactgtcgtatctgccttggcattaccactaataatgaaggttaagccaacaaggacagatgccgttccaactgttaatttcttaatggcaaatcgttgtcgttttgctacttgttgcttatgtaatttgtccatattttatatcctctttctaagacgcaatttattacgcgtggtgctagttaaatcgttctaggcaatatgctatattataagccaaaatggctatttctagccgctgctgaaaaccagctaagctccttgcccagttattttcagcgttatagtagctaagcaaagaaaagtcgctctcaattgttcttctaattgccatcagttgatgatcgttatgctttttagcgcctttcatgtttcttcgatatggtgtccaaagcacatagccgtcatcacttactatcgcgtgaaccttgaagccgtaataatagattttcttagtggctttatatccgatatcagatatgccacgaaagatcttgacgcgatagttgcggatgggctgacaaactggaactgggaagctgtcaataattaagaattctccagctgtttttacttcttgattccaatcttgacggatacagcgcattaaaggcaaaagcattcgtgcccgacgattaaagcgagaatgagacaaaccgacaaagaatttacaaaatcttctttgagattcgataccaatttcagtttgccaaataagcattgctaaaatagaactgtctaagagcttaacctgatcaatatttttacggtatttcagctcatcaggagcacaaagcttgtacaaagaacgacaaattacatttagccgagcaaagctaacttgtaaatggtgagaaaaacgattaagcttgagatagttcaattagatcagactcttttctatttaatttaagttacaacttgagtctaatccgattggacttttttattaactaaaacgacttaactagcaccacgcgtaatttattatatattgaatatgtggggggggcaagtgcttttgtgtggaaaccctgctgagttgggtcccaactttcaattttcactggtttaaacagatgtgagaacacaatgttaccaaataaatccgttatggttaggtgaatgatttcatcgctttgccagtctagaccggtagtatcaatccagtaaataaatggggtataacattttaccatttttcaaatcctccagcgcaaaataatatatacttttttaaaactaagctatattattttgctccacctgctttcggatccgttgcaaagttgaaatcgaaatatcaaaagcactcgcagtctgtttgtaggaatgagtaagcaagtactcataagcggcttggtagtgcggggtaatggctctttggggtcgtccttcatgataatcagaccggtgtaacttagcataacgtttcccttattgggtgcggtccacaatcatatcccgttccatttccgccactgctaagagaattgttttaactaatttacccacagttgagttttccaacatgccaatgttaagtacattgatcttcactccttgattcattagtgggtcaataacatttaatgcttcccgggtatttctagctaaccgatccagcttggtaaccgtaatcacatcacccggtttcgccaattgagttagtttagcaaattgtggtcggtcagttgtagttccagtaaatttttcggagaaaatgcaatcctcactgatcccagcagtttgcaattgattaatttgatctgctagttcttgtccctttgtagacaccctagcatagccatattccgtcatttcaatccatcctttttgaccataagtttctgaacatcatttaagcttgatgttgtaggcccagcacgttcattcaaaaagctaaaagtttttgaacaggcttgcatttaatatagtgcgaatggttgagaatctacatagccaagttaaaatttggtgtcggtttagctgacacattttagtcgatgtgcgacaccgttgttgacaccgaatcttgaaatttgaaaagtgtcagttattaactcaaatggtgtcggtctggtgttggttaagttgacactagcagattattgttatatcaagcattgggtagcttttgaattgttttggtgtcaatggagatatgatggataaagctagtagtatcaaggtgttgagaggaaaagtgtcaaaggtgtcaggttttgaccagaactttttaaattaactaattaagaagaaaaataatagtaattaatgtaaaaatgtactgagacgtaaaaagtagacaattaaaatattggattaatagaggcttgacttcgatactctttcggggttaagccttttaatctgctctttatcctttcgttgttatagtattcgatatattcctcgattgcttgagttaattcttgaagattatgatacttgtattcttgatcatagaacatttcagttttgagcaggccaaagaagttctccattagcccatcatccatggagttgccctttctggacatgctttgagtaataccatggagttttaaagctcgctgataacgagggctttgatactgacagccctgatcagtatcaaaaatgcagttattaagagctgtttctttggcaaaagccttgtcaagcattgtcattactaaatctatatctggatgtttggagatagtataagaaactatatcgccaccgcagccgtctagaataggcgataaataaagcttttcattattaagatgaaattcagtgatatcagtataccattttgtgttaggcagggctgcgaagaaatcacgatgaattaaatttggagctattttgccaatagtacctttatagcttgaatatttgcgcttattgcgcctgatgcctttaagacctaatttatgcatccaatagcgaacggttttctccgtaactttccagccctctctgattaactgcaaagctactctgcgatatccatagcggccttgatgatgattaaaaatctcatggattctagcaataagctttgaccgtttaggcttgacgggctgtcgtttgataatcttgtagtatgagcttctggcaattataggtagctcagggtgctctgcaatcgcagctaatacataatttaaactaactttgaattcttgccttagatccgtaatcaccctagctatttcttctgatcttcttggtccaaggcacttagtttttttacgtattcgttcacaatacgcaatcgcaagttttcttctttcagctgctggatctctttctccagtttcttgcgagatttctgcttttctttggtcacgggcagggcgtcctttctgtttgataatgacattatacccgtttttcttatattctctaatccaattgttaagcatgccaatacttttaaaccccagttccaaagacagctgtaagtatggtttattgccaaagattgcttgttcaatagttcgctgcttaaactctttggaatagctttggtttttagtagttaaaatttctattccatgcatatcaattaatctaagcatatagtctaaattagctagattcattctgtacgctttagccaattgactgattgagatattttcatctttccatttatgataaatttctattttttgttctttattaaatttagacatagtaaacattctaagctaaatagtgaattagttatccgacgggataattgattcactatttttattcttttgtagaattaaagtagtggtaaaacgatatgccctgaggtctttagacacttgatgtcgcataataaactggcagttttacttaagttttcaatagtctcttcgaagaatgtggacactagatgtcgagtttagaaaattagatctgatttcttaagtaaatacgttttactactaagttttggaggtttttattatgcaagttacttttggaattgatgtaagcaagtctacttctactgtttgtgaactaattggtgaaagccaaaatgaactaaccattactaataatcgtcctggttttattcaattgcttcatgaattaaccgctttttctaaacatccgcaaattatttttgaagctaccggtgtttattcacgcagactgcaggcttttcttgaagactacggctatgaatatgttgttattaatccgcttaaagccaaaaaagagatgaatatggggctacgctacaacaagaccgataaaactgatgcttatcatttagctttaattcaaagactttatcgccatccggttaatcaaagcgaatcccaaacttataagcagcttaatgctttgagccgcttctatgaccagttaacagctgacttagtaatggctaaaaatcgactttaccaagctctacaatcgacttttcctgaaattgaaaatctattttcttctgctaaaggtaaaaattactggcaaatagttgtgcgatatcctcattgtgacttagtaagaagagaagataaaaaacagcttattaactggttaatgagcttaaaggggattgcttttaaacacgctctaaggactgcagataaattaattgaattagcttatcaagcttatccagttgtatcttgctctagcatagaagtcgagcaagtgcagtattatgcacacagattgcttaatttaagtgatcaaagagaaaatttaatcgcaagaatggttaagttagcgaagtctttgcctaatcatgatttagaaaacctagaaagcattccaggctttgcacagaccactgctgtcagagttttagcagagttaggagatttacgcagatttagtaatcctaataaaatcaatgcttttatcggaattgatccaggcagatatcagtcaggagaaatggactctaatttaagtattactaaacatggcaatgcagtcgcacgtaagttgctttatcgagctattggacaaattgataatgcagctaagacaaatccgtgtcatatagcagattattatgaaagcaaaaagctatcctctcaaaccaaagggttcaaaaagatagctattgcttcaattcataaactaatcagaaccatttatgccctgattatcaatgatcaaccatatgattacaacgtagccacacataatcaaaaagactttagtcgtaattaattgatcaagtacattataacgctaagcccaaaaatcagatatggatctgggcttatttgtcgtgtctaactaaaaaaataaatcgacactaaaagatgtttaagttgaaatttaaacaaaaaatgaagtcaaacttcttattatgcttgactttacgtagaaaaagacctaaaagtgtctaacttttaggtctcagttcactatttactcgacactcgcttttacaatatctcccttgcccctattcaattccatcaaaacgataaagtcagctttttggagttgactccaaaaagcagcaataaatgtcatttgtttggagttcattccaaacttttactaacccttgatactatcaatcccacagccaactacgacgggattcaaaaaatcaatcttattgattggctactacaataattacaacgtaaaaaaccacattactcacttcaatttttgagcaatgtggttttatttttctgtaattttaatgctttctacaacctaccattctcttcatccatggttcgttccatcaaatcatgaactgcatccatgtcattcagtaatacttcctccttagctgttaaggttctctcttccttggcttcagtcaacatacgatgatgccaacccagaatatcactcaatctagtgtacattataaagcccaagaccttactatcttccaacagctgacgtagttctttttctggctccttatagcgctcatcttcatcccaagcagcaaaatcatcaataaccttttccactaacttatgaagttcttcctcgcttttcattaactgtattctttactatttgttgtttacagtcaaccacattttgaaaaaatctcacataatagaaatttaatcatattattcaaaatattcttaagcaaattaaaaagagcccagacaggtgactaaaccgtttgaactcttggattaggaaacttttttagtttcaaactacaacgtcagattaattattgaatttcttgtagttttggatgtagcgcttagtgcggcagccaagcaagtcgccagcgtgttcccattcagtatacttagaagcatcgcccatttggctacttgagccagcaaagccaccgaagagcatctgcttaacgttgaagtagatttggctcttcaaagccgacattgtacggtagttggtgttaaattctgaagaaattggcaaacctgcttcatcttcgtaaacttgaccaacacgtgagttaagacctgaagccttggctgcacgttcaataccagtaacatagtgatcaggatcccagcaagacttgttgtttgagtaatattgattagctacacggtcagcaaaatttaatgcaccgcgcttgtaagtccaagattgcttgccaagttgattacgagcagaattaatcaattccaaagtgtagttgcttaattcaactttttgactatcagttaacttagttacattaaccaaggtgttgtctgaaccagcatcactatcattattttctttcatacccttaattgaggcatttaccaaagccttgctggccttaccagtttggttccatttgataacggcatccttggtgtaaccagaaggtaatgttattgatgcagcatcaacatttgaagtttcttgattgttaactgcagtaattgcaccacctgctaaagcaacggcaatgctaattgttgataaaagtttaatgctctttttcattttcctaatcccctatttattatttatgaaagctcgaaatttttaagtccttattattttcaagctttaaatttaaactcatttatttaagaagtagtcggtttcttaaacttcgttataagtctcttcacttaatagggtagcaggttaaataaagaagtctatatgcgtaaatatttaataacaaacctagataacatcttaaaagatattgaaagctctttcaaatgcgatagcattaggttaagcaaattaaataaccatttctatataattaactgaaacttgaaagctaagattaacgctctttccccgcgcctcttggctttttcttatcaaaaataaaaacgcaggatctctctgcgttatactttaagtgtcgacctaaaaagtaaaggagatcctgcgcaatgaacagtatagaacaaatcgacacagaaaacgatactaaatccttaatttcttcatttattaatctaattggtctagctaagttaactaaacaagtcaattttaagcgtaaatccaccgtttcattaaccatgattatctcttggctgatgtcagtacattttgctcggctttctttattcagagctaaggatgacaaacgtttttccgttagaactgctcgcaatgtacttaacgatggaagaatcaactggcaaaaactattatgcttgattgcagcccggctcattggctgcttaaaaccatttatcgataaaagacgccgacttgcttttatcgttgacgatacgctgatggctcggtctttttctaaaaagaccgaattgctagctaaagtctatgaccatgacaagcatgagtatttgaacggatatcgtggtttaactttaggctggagcgatggcaataccttcttgccggttaactttgccttgatgtcaaccaaaaccaagaaaaatatgattggagctgctcccattactgctgatgaacgttcaatttctggtaaaaggagaaatcaagctcagagaaagatgaatgatgtaactgtagagttgattagacaagccttacgattaggagtagaagctaaatacgtcttattcgattcttggttttcttctccaagaatgttttggattttaaagaagatcggtttagatggacttggcatgatcaagaagagttcaaagatttattacatttatcgccattgccgctatagcgttaaagacttgtatgatcgtttggctgcttcaaacatccgtaaaaagaaacattatctttattcaagcatagttgaggctcaatatcatggacatagctttttattaaagctcgtctttgtctccaaccgtggaaacaagaacaagtatttggttttagctactactcagacaaagcttagccctgaagaaatcatccaactttatggtcgtagatggcaaattgaaacatattttaagacgtctaagcaatatcttgctttagataaatctcaagttcaaagctatgatggccaatgtggctatatcgcagttacagcaataacttatgatctattgacctggcaggaaagacaaaatacagatgataagacaatcggagatttattctatctaatgaacgaatccttacctgatattagattcgtagatgcattggtctacttaatttcagaattaaaagagcttaaacagaatagttttgaaaagatagatgaagtaatcaatgactttattaaccaactgccacgattcatacaaattgcactgaaacagatcatataaaaactaattacgtctaagaaagctcaatagtgacaggacttgagcttgattttggtgctttcaattttcagataattaataaacaatttcgaatttttttacttctgctctaaaatatataatatattatataaatataaccatagttatcttcattaggctaaaaagctatattaaataatccttgttatatcagcatttaaggagattttatacaatttaaatatacacatatagacttcaaactgcctaatcatttataaaattacaaatcataaaaaactaccaagattctcaaaaaagaaaatcttgatcgttttcaatcatctggaagggaatttttcttaagaaagattatttagcaaatcccaccttataccaaatcgaatttgattcagccggtttaagtgaatagttaaccagcttgctattcacagccttaatggagtaagaattagtcattggcacaatataagcttcatcattcatatattgctgccacttatgaaaggccttaacccgatatgcatgattaaacgccttagacgaatcaatttcattgagtaatttgttgttctcttttgtcacaaatcttgagtcattcattgcactagtttcactatagattcctctaggtgatggttcactagacaatgaccaggaagcaataaacatgtctatatttttatcgtcttggtctaacttatcatagaaagaattgaattccattaatctgtttccagttaaactcacatgaagtccaatctttctccattgttggatgtagttttgaataattggttcttgaacggcggacccactcatagctgctaaatgaatgctcaatggttttccgttaggttgaactctccatttgcctttcttcttatatcccgccttatctaacaattcacttgctttctttaagttgtaaggatagcctttagaatttttatcaaagtaatcaccaaattgttcaggaattaaggttggcactctaaaagtcaaaccttgcgtgtatctcttttcaacttgattaatattcattgcataagcaattgcttgccgtaaagatttgctattcatcttagaattaggattcataacattcttaccatcttgccatttacccactttgaagccgagatagctgtaagcaagaggaattttagcaatgaattttgtatctttcgcatctttaactgcttgccattgtgaatttaccacatcggctatatcaaacttatgactcttaatagcttgggatgcggaattagtagaaactacctgagcaacaattttgcttaattttggtgtacctctccagtaatatttatttggaacctaagttacagattgtcctctaactaccttgctaactttataagggccaaaaaagataggattttttctaatttgatctgatgaaaccaatttactgaaaggaatattctttagataatgatacggagcagcagtttcaataaagtaatcattacctgattgcaacataccaggcttcattgaaagaaaatgaatgacaatggttctgccattttcaccattaggaaattgaataccagaaatagtttttgcttttccattgtgataagctttcataccaacaatattttctaaagaatctgaatactgtaaactattagttgctttgttggcagtcatttcatatggatattctaagtctttagctacaacttgcttaccatccgaccatttaacacctttttttaccgtaatagtaattgtctttgcatttttatcaagtttaaaagtagcaggtcctttattattaatttgatatacgcgtggtgctagttaaatcgttctaggcaatatgccatattataagctaaaatggctatttctagccgctgctgaaagccagctaagctccttgctcggttattttcagcgttatagtaactgagcaaagaaaagtcgctttcaattgttcttctaattgccatcagttgatgattattatgttttttagcacctttcatgttttttcgatatggtgtccaaaggacatagcccataccttttaactcggcagctaagtcttttcctaagtagccttcatcgcctaaaagataatggttaattggatgagcattaatcatcaattctactgtttctttggcatcatgcactgatgctttagtgactgcgtagtcaagcaaatagccatcatcgcttactagcgcgtgcaccttgaaaccataataatagactttcttggttgctttatagccaatatcggctatgtcacggaagatcttaacacgataattacgaacaggctgacaaactggaacaggaaaactgtcaataattaaaaattctccagcaacctttacctcttgattccaagcttgacggatgcagcgaattaaaggcaaaagcatcttggctcgacgattaaagcgagaatgagataagccaacaaaaaatttacagaatcttctttgggattcaattccaatttcagtttgccaaatgagcatcgctaagatggagctgtcggaaagctttgtttgatcaatgttttttcgatgcgtaagcttatcaggcgcataaagattatatagtgaacgacaaattacatttaaacgactaaaactaacttgtaaatggtgagagaaacgattaagcttgaggtagttcaattagatcagactcttttctatttaatttacttacaacttgagtctaatccgattggacttttttattaactaaaacgatttaactagcaccacgcgtatttgatatgaattatcagtatcgaataacccctcattaccaaattgcatgacatcagaatcaacttgatcaactgataattgactatcaaaaatacctttaaaaggcgtatctgtttcgattgcgtagtttaaagtgccacctttctgtgcagttttttgtacagtttgttcaggaaatttctttgcactttttgctgcatttgtattgctttgaccacatgctactaaagttaaagcagcaccaataagtagaccagttgaaccaaataatttaattgacttcatagttttttctcttttctgtaacaaaaaaaggtccacatcccaattaggaatgtgaaccttgcttagtaatcaacttaattaattatttttaaacaaaattcgccgcacaccataatttaggatcacaaaataaaccatcattttggtggcggcggcgtaattctactgttgctgaattttgtgattctaacatgatatgtagctcctttcttaaataattttaatattatgctaatcttattttattgttttgtcaataatgaattttgaattttatcgataatctgattcatcagttttaaaatgtttgtgtgaagggatttcatgagaactacgctctttttataaaaaaattgataagagacaaaagagtaagcagatatagacttctgctcactctttattttattgtaaaaagaaaaagaaccgaatcaaaatgattcggttccaaaagcgtcaaatttgtcaatgtcttaacttaatgatactgtcactaacttaaatcaaacaaaagcaaccagtatagatcttttatctacactggttgctttattaattgatattgcagtatggccttactactgcattgtatttagaattatttgtctttagcttcagtgcttctttcgtactagtcattttaacttaggctaattccactcaatactaatcttgatcgcttttttcaacgtttgatagacagtagatactcttaaaatatctttaacaaatttatcttgatcttcatgagacataggactatcaaatgatattttgatagttatcgtatcaacatctggcattccgtgtgataatctctcggtattcgcttccgcattaatcttaaaattttgaacgtccagatggtgcgccttaataagcaatccagctgaaatagacatacaagaatttaatgccccagttaaatattcaacaggatcagggcctccagttttatcaccattgtcagctataaagcgatatctggcagttgaattttcaatttgccattcagtatcgcttaattcactatttaccacatattttgtcatttttccctccactctacaactattctgccttaagttttcaacctaattatactctatcgtggatctagttcgtatatgttgttttgcaccccgatgagatcacggacattaaaccaaaagcagtccatgatttctcatgaactgcttagaaagagatacttctaatattttcgaatttttattgatgttactctgtgacctacatctttataaagaatgatattagccctttccttggttggtacaatatagtcacgtagattaactaaattaactgtccgccaaaccttttttgcataatcaattgattcatctaaaggaatatgagcccaatgataaaagaaattattaggattatctttattaatatctagcaaacatttaaagcgagttaagaaccattcctctaataagttttcactggcatcaatatagatggatagatctatataatcactgataatcttctcttcattttcaggaatttgcaaaatatcgattccttctaaaatcaaaatatctggattggtaatgctacgatatttaccaggaactatgtctgaaagctcatgtgagtatacaggataggaaacttcctctaccccatcacttacttgagaaagaaaatcatttaatagtgatacattgtaactttcaggaaagcctttgcgtgacattaaattcttttgctccagtactttgttgggataaataaagccatcagtcgtcaatgattgaacatctaaatcagagtaaaattgactaataagagtctctattactttagcagtcgttgactttcctgcagcaactgatccagtaattcccaggataaatggctggtttaaatcagcactcttaatgtaatttgtctttaatttagagaacattttcttattttgaacgcaaatcaatatatattgaactaataggatatatacttcttgaagttcattgactgtaacctgtaacttattttgatcaataaaactttttaatagttcataagaaggaagctcaatcttagagtttaatttagtccagtgattacggtcaacagtaataaaattattcatcatttacgctcttttaagtaccaaattaagaggtgtaacaattatagggacaagaattgcattaaatatcgcttctaccaagccgttgaaacctagagcagtgactagaattaccaacaatggagttgactgacaaaaatgccctaagtaacttgttaaggtgcttgaattagacataaacattaaatcggtaagtaaaattacaagaatagtgttcgtcagcgaagcaactgctccactgagcatataccctatcttttgaatatgtgcatccctatctttaaacttctgactaattaatccaggaaagaatcctgctagaacactaggaacaagagagattactggattttggaacaaaagcaagctgaccatatcccctggttgtgtataggccacaactaaacgagtaattccccaaactaatccaaaacccaatccccatttcggtcccattaaagtcccataaacagcaatggttaatggaatagtagtaattgcaggaagactaggaagaattcttacatacccaacattcggaacaaatgtctggataaaaagcaatgcaataaatacagctgtgatcgttaaattggtaatttcttttctagtcttcataatgatacgctccttgccatatgttgatttttcattcttattagagcacgatttacacaagcaggaacagcatctgaaatatcgcctccaaatagcataatttctcttacaatactagaagatatgtatgaacattcagggtttgaaaatagaatcaaagtttctatattggggtccattttcttagtcattaatgctatttgttgttcataaacaaagtcctcattatttctcacatcacgaacaataacatcagcatttaattcatgaaccaaattaacagttaaatcactttgaacaaggctcacggaaacattaggataaacagacacagcgtctttaacaaattgatatctttgttgaggagaaaacataccatttttggaggtattatttgaaacaacaacgactaacttatcaaataattttgaagcacgactaatgatatctaagtgaccattagttattggatcaaagctacctggaaatatagctttcataatgattcttccttaatttttaatcaattgatatctttttatatttagaaaagtatttcaaaaaccaatttttagcgtattctactgttggatcttcagtggaattcatagtatgacaaatcgatatcttccaaggaaattcaggtgtaatttcagcattctttattgcatgatcactataattctttcctattggagcagccacaataccaattaaattcttatcacgttgaactaaatttaaaatcaaatcccatgattgtgtttgaagaaaataattaggtttcagcctatcacctttaaatcttttgttcaattgaaaggtaaccataaaatcatctgtcagagtaacaatcttttctttttctatttcagagaatggaatcggaccagtaaaatcattaaaacgatgttctttattaaaccaaaccctaactgtattttcgtatattaaatcctcataaataccttcaacagtcgctggagaaacaatcacagctagatcaatatcacctaaaatcaacatcctttgtaattcataagctccacgctcgataatttttagttgaatgcctggattttggttaataaaggctattaacgcatcattgaacacggtcgatataataactggtgcaatacctaatctaacagttccgttactattttctgataattcatttagtttcgaaaccatttcaatatattgttcatacacttttttagattccttaactaaagttataccgtaacgtgtcaatccaacgattttaccctttcgccgattaaagatttttacttgttgcttaaattccatatctttaatcgctttactaatagcgggttgagaaatatggaggacttcagcactacgagttaagttaaagtcattatctgctattgtgagcaaataacggatttggttaatatccaactttgcatccccctatgaattaaaacacttaactatttcttatcgtttttgatattcatgactggctcttgaaaaattctcggatccatctcctgcaaattgtcactaataattggcttaaattccatttgatcaagaatatctttttgtaaatcaatgcctggcgcaatttccagtaattcaataccgcctttaactagcttaaatacggctctttcagttacataccaaacttcttgattactgtcatatgcgactttacctgagaaggtaatttgttgaacatgctttacaaatttctttactttaccttcttggataatgtttaacttaccgtccttgatttcttccttaagtccagctgcagtgaacgtaccagtgaagacaatcttaggtgtatattgagtaatatcaacgaaaccaccagtaccggcaatcttaggaccaaattttgaaacatttaagttaccatattggtcagcttcagctaaacctaagtaagttgcgtcaagtccaccaccgttgtagaaatcgaacatgtaaggttcatcaatagtagcttgaggagcaatagctgtaccaaaactaccaccacctaatgaagtgccaccgaatgtacctgcttcaacagtagttacgatattgtcagataatccttcctctttcataaccattgcgcaatacattggatattgaccaataccgaagtttacacaatggtcggtatcaggattgaataagaatgcagctcttctagcaataaccttctttttatcaagaggtaagtccatttgcttaacgtcttttacaatattagacttaataatatctggattgtaaatgtaatcggtagtctgtttagtcatttcaggattatcagtcggaactacataatcaactaaaacgccaggaactctgacggcctttggatcaagactaccagccttaacaacacgcttaacttgaacaattaccttaccaccattgttgtgagctgccatagcaacagcagtaacatccatggttaaaggctcatcatcaaatgtgatattgccgttttcatcagcataagtaccacggaaaattgatacatctggctttggtgtttcataagctaattaatcttttccatgaatcttaattctatttaccaaagtagaattctttgcagcttcatttaaacgaccaccatcattttctgggtcaacgaaagttcctaatccagtatgagttactagaactggacggtgagcagctgcatctctaaacaattgtgaaattgtaccttgtgggaaattaaaggcttcaaaatcattatccgcaaccattggtgcaagctttggcgctaatgacccaagcccaccaactactcgacggagcattcctttttcagcaaagttttcaacggctgagcctttgttatcaccgataccacatccataccaaacatccaaatcctttggatgtccagtttcttggtatctatttttcatcatttcaagaatttcttcagcgacatcagtgccaaggcagccatcaagagctacactagcgttatctgggaccaattctgctgcagttttactgtcaataactttaacagacatagatttatcctcctatgtttaaatctaactaactacgtttctactgaattggaaaccagatgagtttaataatatgtatgagagtatgtttcaaattagtagaattttggaatcatttaattccttgacacttataaggtaccgcttacatctagcattgtgaaatcattaatttttagcattatcataactattggttataacttataataataataaaaaaggcgaaattacattcgcctttatttaatgcttgattataaatattttatgtattaattccacagccataaaatggctttaaattacatgatttcgatgtttttattcaatactttttgagcatcatccattaaatctttaacaatttctgcagcaggcttagattctttaattagaccagcaacttcaccagccataaagaaactcttatcagggtcatcttctcttacaccaacgtatagtcccttgttcaatgctgaattaaattcatctcttgatacgcctgtcttttcaagttcaaacaacttgccagcttcctcattagcaataccacgagtagcaccacccttgatagtagagccaacaacagcagtaccagtatcagtagcatcgatgacagctttacgccagttatcacctactgggctttctttagcaattgaaaagattgtaccacattgtacaccttcagcaccagcaacaaatgcttcaacaacaccacgaccgtcaccgataccgccagcagcgattaatggaatattaattgcgtcagcaatttgtggccataataccattgaagtagtcccaccaatgtgaccgccggcttccataccttcaacgataactgcatcagcacccatttcttccattttcttggcaatcttaacattaggaataaccggcattaccttaattccagcagcttttaaatcagacatatatggttttggtgtgccggcaccagtagtaacaatcgaaactgtcaaatcttttgtgtaaatagttctttctcgtaaattgattttttaatcatttatttaatcaaaataggattctaaggtatcctgaacctgaccaaagcctttatgaattcggtcgaaatagcggtcattgtagctcattgcctggatgccaataaatacatcaagcgactgttcagttggaaattctgccttaggcttagctttacgcttgatgacgttgttaaaggattcaatcatgttggttgaataaattgaagctctgatttgtttgggataattgtagaagaccagcagatcgggctcaatttccctcaaacctttgataacatggctataagctttattccattttgcataaaattcatgcaagacagctgcagcttctttttggcttgtctgttgatgtatctgcttgaattcgttcatgatcttttcgcggtcatccacccggactttagcacagatattgcgcatgacatgaaccaagcagcgttgaaaatgagctttaggataagtcctggccaaggctgttttcatgccaacaacaccatcagaaagaaagagttcaacttgcttcaagcctctggacttcatgttttgaagcatctctgtccagacttcaatgttctcactaggagcaatgcagtaatcaatgacttccttatgtccattaggtttaatgccaatggcaatatagactgcttcacgctcaaatgtttctcgatgcaaaggaaggtatgttgcatccaaatagatgcagaaaaacttgtcgcttagcttgcgcttgtgataagcctcaacctttggaatcatctgcttggaaatatttgatacctgagctggactgtaatggctgccatacatcttttcaattagatcggctatttccctggtggtcacgcccttggagtaaagcttgataatcatgctttacaagatatccgagtgctgcttgtagtcaggcagcgtgtgctgatgaaattgaccgttgcgatcccgaggcacttgcacttcaattgggccaaattgcgtatcaactttgcggaaataagcaccatttctagagttgccagtattccagccatttctggcatagggatcatagcccagaaaggcagtcaattcagcttctaacaagttattaacagcctgttgtagctctttgcgcaataaattatttattttgtctggattgaatagagcttgagcaaaatctttggtaaaatcattcatgaaggagttcttctttctgtatgtgtttttttgttcaaaccaatcatacgagaaaggaactcctttttctaatgtttaaagaaataaatttaaggaatcattcatccttacacaaactattttacagtctcaaattctttacaatttcctgttagaaaatcattattcaagtagataaagaagacattaactataagaaaaggcgtaggttcatatcacaacctatgcctttttcacactataataatatttttactttacgctatacttttctttcccattaacaaaagtctttagaacattaagattactatctagcacattaaaatcagcatccctatctggcaggatacaaccacagttttcatttagactacgtgcaggagtatatgttgccatcttaattgcctcatatggcttacatacttcccaatttactaagtttcttactgctttatccaaagtcaatgtgctgccagctaatttaccattttctaacaatgcaatgtgattcctaactgttactttcataccactaagcacatattcaccatcaggcatcccaccagtacgtaagcaatcagtcattaatacaatatgattaggtccctttaaatcaaacaacatctgcaaaatgatcggctttatatggtgaccatcagctatcatttcatcaaatacatcgtcagctgttaatgcacagccaataatattaggtgtatgctgagataataagttcataccattaaacgtatgattaaacattgtagctcctgcgtcaagggcttttcgtgcttcttcatatgttgcactagtatgtcctaaagaagcaactacgccttttttaacgatatgtctgacaaattgtgggacattttttcgttctggtgctagtgatatctttctcagcatcccatcagaatctctgtaccacttatcaaattcttcaattgaaggatcctccataaactcaggattttctgcaccgccatgttctttagtgaagtatgagccttcaaagtgaatacctaatatctttgcgcctttttcctgccctttatgtgcagcaaacgttttacaaatttcatctaatttctcagatgaagtagttactgtggtcggcatccaacttgttacaccatattgaagaagtttttcagaaattcttgaaatctaaaattgcagcactttttggtttttcatcttcagaataataaaatccaaattgtccattatcttgaatttctaagtatcctcgttcttcaacaccatgatctaaataaaacttctttgcatgaataaaatatgacattttatacctcgctttttctataaaaattcgactttataaccaaaaataaacaagctacgtctgccttttacaaacgtagcttgttttgggagaggggaaatttataactaatcagaagatcatttattcaaaaacactcgtaaatgtcttagcaatttgcaatggtcttgtaattgcaccaccaataacaattccggctggtccaatatcaatcattttctttaattgttctggactgtggatttttccttcagcaataactggcattccagcatcaaccaaagctttaactaaatcataatctggatgatctgaaacaggactttcttcagtgtagcctgacaaagtggtaccaacaaagtcaacaccagcatcataagcattctttgcttcttcaaagttagaagtatcagccattaataaacggtcaggatatttagtcttaatttcatcaataaattctgcaacagttttaccatcatgacgtgggcgcaatgtacaatcaagtgcaattacttcgacatctgttttagctaattcatctacttccttaatagtagcggtaataaatggcttctcaggtggatattctttcttaataataccaatcattggcaggtcaggaactacttccttaatttgcttaatatctctaatggagttagctctcaaaccaactgcacccgcttctttagcggctttagccatcagaggcattatgccaccctcttcggtgtaaagtggctcgccaggtaaagcctgacaagaaataattaatccattatgaactttttgaataaactcttcttttttcatttttatctcctaaaaatttaccttattctaaagcattactactagtgtccggtggattttctgggaacttagtatcaaatagccagttaaatgcggcactatcaacataataaaacattgcttcatgaccatattctggtaacagcatgtgttttttagggctttctatcctattgaaaattgcaaactgcgttgctggaaaacaagtatcatcttcaagtcctgtaaacattaaaactggacactttattctatgagcaaagtttttaacatcgatataagacagagtacgcatcaacttgtcttccgtcttatgaaatggatcataaaacttaaaatacctaaataactcatcatatggcaatcctcgatcacccatttctagtacatgcttgaaatcagaaagaaacgggtattgagtagcacattttaatacgtggatttaatgccgcagcaatcaaagataaagcaccaccttgagatccaccccaagaatatagatgttccttgtctacacgtgacatatccgcgactgtttcaattaacgtgtatacatctagatatacatttttataaaacagatgatctggtccatccactgctccacgaattatgtggcctaaaacggtatttccagcataagtaccgttatcaaccgactgcccttgttggcctctaacatccattgcaacaacgcctacacctatcgcagcatattgcatgaaatcaacccaatcgagagcttgtcccatgtaaccatggaaatagaaaactactggaatatttttttcatgtgctggaaaaatgcatttagcatgaactattccgttatcagtacctttgaagaacaaatcataaaaaacaacgtttttaatattatcgccaaaatttcttttaattaatttaaatggctttgcttctatctttttgatttctttgctccaaaaactatcaaaatcatctggaacttctaatctacctcgatatgactccatatcttttaaggacattgaatctttcattatagtttcacctttttcaactaatccttaaccttctcattgatagttttagcagttaaacctgtgatatcatgtgcatattttggagtaaccaaaccaattaaccaagcaattacgaatgaactaatgaaggctacaattggttgtaccaatgttgcaacacccattacttgacaccaataagtaagagcagcactaattaatacgccccagacagcactaacacggttggctgacttagtaaagataccagcagcaaaaataccagcaactggaacaccaaacaaaccagtaattgaaaggaagatattccaagtttgagatgcattacccatcaacaagtaaatagcaattcctaaactaaatacaccggcgatgacaataatgatacgagctagtgtaacatcattcatcttccatttcttatcaaaatatctttgcttgaagtcagttacgaaacatgaagaaatagcattcaaacttgaagcaatagttgactgagcagcagcgaagatacctgcaataattaaaccggctaaacctgctggaatcttggtaattacaaagtatggaacaatagcactagtgttaaaaccttttggtaaacttcccatcgtgtggtaataacaatacaagaaagtacccataccaaagaatacaaaaatagttacaattgctaaccaaccgtttgtccaaagtgacttggcagttgctttaatacttggagtagtctgataacgctgaacaacatcttgactagcggtatattgatacatactattgaagaattgaccagcaaagattactggaatgaacatagctaaattgttaggattccaatctttagcagataagaatttagaattatctacagcaacttgtgcgatcttcccaggtccaccagtatatacgactgctaaaatacaaattaataaagcaccaccaaggagaaggaaaccttgaataacatctgtccaaataacaccttcaataccgccgaggaatgcataaataatacacattgcaccaactaaaacagcaatcaatattggattaatatttgaaacggaagtaatagccaaaattggtaagtaaataacaatggctactctaccaatgtgataaagcataaatagcaaacttccgagtgaccgcatcactggtccaaaacgcttttccagatattcataagcagtagtaacctgtaattttctgaagaaaggtacataccatttaattaatataggaataattaaataaattgttaacgtcccaatcgaataaccccagtcagttaaaaaagcttgttctggtgttgacatgaacgtgatcgcacttaaagtagtagcccaaatactaaatcctgcagcccaagcaggcaccttaccttcagctttgaagaaagaatctgtacttttacttgcccgtttagtaaagtaagcaccaacgcctaacatcgctagcaaatatgcgattaagacgatcctgttccacataccgaatcctgttttcgacataatttttctccccttttatttaattcatttttacttcttttctttgtgttcgcattatgaaaagtttcaatataataggcgcaatcaatgttgtgattactgtgacaacaatcattgcagtatagtgattttgatctattaattgtgattgaagagctacattagcaacaactagtgccatctctcctcttgaaaccatacctgcaccaacaatatttgcttctgtccaattaagatggaacatctttgctccgataccacaaccaatttgtttacccaagatggctataattattagtaaggcaataaacaataagtccttacccatgccattaaaactaatctgtaagccaatacttacaaagaacacaggaatgaaaactgcataaccaattggctcaatttttgttgataatctgtctgcataattagtttctgaaattgctaaaccagcaaaatatgcgcctaaaacatcgctcattcccattgcaactgctaaggcagctgcaccaaaacaaagaatcatcgcaccagctgtatcactttcagaagcattaagatcactaaaaatatctaagaattttggcacaacatacttaccaataagcaaaacaatgataaagaataataccatcggaatgatcattttaatgattgatgtatggtgaccaccaccgtagatactggagcaaattcctaataaaatgacacagataatatcatcagcaacagcagcaccacagataattgcaccttcacgagtatttaaacgattcatttcttttagaacttgaaccgtaatacttacagatgttgcgcttaaaactaagcccataaatatagatgcttttactgaaaatccaaaagccgtatggcacagaagatatgctgtaccagttggaaaaattactcctaaagtagctacagttaaagctggagcccaatatttaattaataatttcaaatctccttctaggccagcaatgaacatcaaaacgattacacctagttgagaaaaataattaatgaatgtggtgggctgaatccaatttaaaatagctggtccaactaaaatcccgactaataattctccaattacacttggcatttttgccttaactgaaaagtgtgccgcaattttagttaatagcagaatcaaaaatagttgtacaaggtacgtcatcaaagtcacctaccgcatgtctataacagcattgaccttgtcaagttcttgttcaatcttgttatcatcaatgccatattctaggaagattggaatttgaggatcaagtcctaaaatcattggttcccaatctgtagttccttcacctaacatcacagtttttttattcttaatatcctttagatgatagttagtaaccttatcttttaattctttaaaggcaacttcaggcttttcaccaacccagtaccaattacctgcatcataagtgaagccaatattaggatattgatttactgcttcaagacctttaagaacagtacttaaatagcctgtttcattagaaagattttccaatgtcaaatcaacgttagcatcttcaagaagcttcgcagcatcctcaatttccttttggtcaacatctttaacgtcacctacgaaatacttcaaatgcttcaattgatgcttttttgccatttcaacattgtctttcaaactgttattgacatgtccatcaatgaaaaattgttcaggaactgaataatacaatccccaactgttctttttacacaatgctttgattgcttcgagttcgtcgtctttggtgttttctttaaagaattctccacgaacttggatattgtcaattttatctttcaaatttgaaacatcctctaagcaatcaatttgactctctccgctattcaaacgatcaacaaagattgccgcattcactgaaactttcatgacttgcctcttttcttcaataaacgggattaaaaaaaccgtacaattatgctcagcatttgcctcacataagtacggttgaattttgctattagttaatacacctctagcatacacgaaaacaattttattgcaagcgctttctagaaattaattttcaaaaatgctagaaatacctccataaagttgtgcatcattacctaaagaagccatctttaatacggttttacatagatttggcggtaaaatctgattcaatttttcgtccaacaaatcttttaaataatctccctgcttggaaacagcaccaccaataactaatacttctggatcaagaagtaataatacactgcttaagccctctgcaacttgcaaggcccaagcatcaataattttcttttctctaaggcttccttttttggcacgtgcaaaggcttcaataggatcaatacctaagggttctaattctttttgtaatgcaatggttgatgaccgctgttcatagttagttgatgttattggatcaaataatgtatatcctattgaattacccgtttgatgatatccattaaataaatgtccatctgcccaaaatgcaccaccaattcctgttcctaatgcaacacaatagatagtactagcatttttaacacttccagctaatttttcccctaataaagccgcactaacatcattaacgacactgacaggaattttaaatgtccgctctagctctttcttaatgggagtaccttgatagtcagaaatagttggtccagcatacattatgcttccatcgtctccaacaataccggcggtactcacaccaatcccatctaattgatacttctgtatcatctctttggtaactttaataagtgacttcaaaatatgtccgtccttattatgtaatgtatcaactttgcctctatctgaaatctgaagattctcatctacaataccgtatttaatcgtggttccgccaacatcaaaagctaaatatttcttactcatttggttcacgccttcctgtataatcaagttcttatattaagcgctttcatagtatcatttaaaaacaattttctcaaataaaaatttagaaaataattttcgtgctctgtatctcttgatacacctacgctttgttcaatttctgaaaattattttcgcaatttagagttgcgtaaagcgttttcatgttctatactgcaggtgttggttgaatttgccattagttatacagtaattaaaaaaatattattttattttgactaaacggaggtcaaacaaatgcaaaaagtttatgcagccttaatggtttcatttgatgaagatggtaatattgatgaaaaaggtactcgtgaaatcattcgtcacgatatcgatgttgaaggtgttgacgggttatacgttggcggttcaactggtgaaaactttatgcttggcttagaagaaaagaagaagatcttcgaaattgcttgggacgaagttgaccaacaagttgacttgatcgctcaagtgggtggcccaaacttaaaagaagctaaagaattagctaagttcgttactgaattgggttacaagacaatttctgcagttactcctttctactataactttaccttcgacgaaattaagcattactacgatgaaatcgttaaggatgtagatgcaaagttattgatttactcaatttctgcattaacaggtgtttcactttcattggataactttgctaaattattctcaaatccaaagattatcggtgttaagtacactaatgcagacttctacttacttgaaagacttcgtgagcgcttccctgataagcttattctttcaggattcgatgaaatgttgttacctgctttaattgaaggtgtcgatggctgtatcggatcaacctacaacgttaatgcaagaatggttaaagaagaaattgctgcttacaacaacggagacattgctaaggcacaagaattagaacacaagaagaacgacattatcactgcccttcttaataacggtatttacccatcaattaagttagtattgcaaaagatgggcgtacatgctggctacaaccgtgaaccaatggctaaatacactgataaagttattgaaggcgctgacgaaatctacgctaaatattttaataagtaattgcttatttgccaaaaaactacaaatttagcataattaagcggagaaagattacaaaatctttctctgtttttttgatttaacacattaagaaggttttcaatatgacgtttttaactgatttacaaaataggctacccgatttacctcagcaagaaagaaaaattgctttatttatattacaggacccacagtttattcaatcagcaaatataaatcaattagcgtcaacaataaaagttagtaatgctactattactagatttgcacgtagagttaactgctctagttttacagatttaaaagtcaaattggctgctgctgcagcttcttcacaagtaaatactattactaatcaagataactctaaaacgaccgctcaccaagtatatgatttttacaatcgagttctatctgaaacacaaaataaacttgatataaaacaattaaaaaagataatccaactcatcaaatctgcaaagagagtttatttttatggtatcggttcttctggatataccagcttagaagctactcaaagattactaagaatgggtatatctgcgtttgcggaaacagaaagtaataatatgtttatgactagcagtatcatttcaaaagatgacctgattatagctatttcttcaacaggtagcacagattccttggtaagagccattgaactagcaaaaaagaataaagctacagttgtagcattaactagctatgacaatagcccattagctcagcttgctgatattgtagttggtgttcaagatacaaattatattaacgacgctcggtttattaactcacagttttcaataatgtatgtaatagacgtaattactacgctacttttaaagaataataaatatcacgatagaatgactcgaactattacttctgtcttaaatgaaaaatacgatgcatacaacaaatagcctgatatgattatcgtttgttatatctgatttaactatatttcatagatagtattaaccaattaaccttatatacctgatataataattatggtgaagagattaattggataattcataatacttcgcactctagaaaacgtcttctgttattgaaggcgtttttgttttgttcaagtgttttacctgaaatctaactggatatttttaggtattagcacaaaacagaaaaaaagccattgaaaacttgttttttatacaagtaatcaacggctatttttctatccaattctaacgttcttaaaatcgtatggaacgcctgtagggttaaaggaaacgccctttacggtagtctttaataattgtggcttagcaacttgaactaatggaatagttccttggtctttcatcaataccttctcggcttctactaatcttgcccagcgttttactggttgattgccatatacgttttctgattcattcaacagcttgttaaattgattgttattccaaccattgttcaaataacttgatcctttttggaaaacgtccaagaagttgattgggtcgccaaagacagcctgccagtttttaattgtagcttggtaattaccagctgtttgacgtgaaatcaattgagtatatggaattgtttgaacagaaatttgaacacctggaagttgatctagcttactttgaagaaattcagctgtttgctttgaagtatcgtcatcagaaactaacaaggtaattttaattgagttagtcttagattctttatacccttcgcgaagtaattgcttagccttagcaagattatacgatactgcactcttaacgtaagcatcatcttcaaatggtgttcctgtcttaggattattgcccatacctgatggaacgaagcctttagctgggattgaaccgtcttttaagacattatttgctaattgtttgcgattaattgctaaagaaaatgcctgacgtaccttaagattcttgaatgctggaaccttattttcgttaagttccaatcttttaatcgctgaagacaaacgtgcatggtagcctgctttattcttatttgcggcaacttgctcaccagtaagtccagtctcatctgccttacctgcttcaaaaagattatagctagtcgtagttgattcgctaacctgttcattaactttatttaatttaacatttttagcatcccagtaattcttattcttaattaaagtccaagtcttgttgttaccattccatctagtaagcgtgaatgggcctgaagaaactgtgtatttagcttgcgtgccgtataacttgccatatttttgcaccactttttgattttgcgggaaaaataatggccacgacaataaaatcttgaagtaaggcagtggtctagttaattgaattctcaaatgatatttagaaggagcagaaacacccaaggtatccggagacttttggcccttactaattgcttgcgcatttttgatctggtaaagatagaatgccatctgagacttagttactggattaacagtacgcttataagaatatacaaaatccttagcagttaatggatcgccgttagaccattttgcggtttttctaagataaaaatcataagtcttcccgccattagaagttttagccttagtagctagagataattgcggtttattgtttttatcaaggcggtatagtccgtccccggtattaagaagagcttgaaaactggtagtatcagttgccaaagaaggatcctgcgtagaaagctgtgtgatctctgaccaatttaaaacctgcttttttgaaacggtattactatctgattgcttaccacaagcagctaaggttgccgtagttaaagctattaatccgaatgaaacaacttttttatttattctcataaaaatctcctttgctaaaaacggtaaaaagaaaaacgccttactagatcaacttgatctaatagggcgttcagtaacgcggtaccacctatctttatggaaaaccaccttgaattgcgtacggccgtctggcgatacgttaccgctataacgggcggacccagaagctactaaaaacttcatagcttcaagctcaaaggccattttcaaaagtaggtcgatcattatctttcaccaagtgataactctctgtagaaggaccgccaatttactttccttatcatcgctaaataattaataattatgttgattaagataatagtctaaatcattttaaaagtcaaatataattttaatgcttttcattattttactaactattcttcagttagtcttattgactcatttcccaaccttcgcgcatatctttaactaatactgaagcatctaaatcaaggtctacctgttcatattctttttttaattctggatgtctctcaatatctttcttgatgaactcttgaatcttactcatcttatttcaccccatattggccttcatatgataaaagaccgttgatgtcaataactttaccgtagagagtatcatcttctaatgaatactccactgaaccataataacctttatatgataattcttttttcattagattttacctcataagttaatttcgtaaatactaaatcataaatctacagtttcatgatccagtgtttttcattttgtccaaatctacttaagttcaaactccaacctaaccggattatggtctgcatactcaaaatgagtattaatgttatacgcctttgcttgcacgtttttcgacacaataaagccatcacaaatggtcatataattaactttaggatcatatttcatgtctgtagcacgaacagtcgcaacattttcgcgattttgcgccttaatcatagtgaaatctttaggcagcattttttgatcaagaacggatacccaactaggaatttcttcttggtgctcaaaatgagtcatcatgtctttccctaacgcatgattaaagtcgccgccgacaatgacatagttacctcgtcgatattctttttccatcacagaagaaatcagtttcatctgtgccttacgcattttaccgcccttatcataagcagacatatgtgagttaatcattaccaaatcttttccattagttactggaaagcgcataactacaaagcaacgatctaaatcgacaaatttttcaataggcccactagaaacaggatattttcttcttatggcactatccatcttatatttgctcatactcaacaaccctgaacgtacagtgccatgaggattgttcaatggaaccgctaaaaaagcagagtggaaattactagcaaaagttgaatccatttttggaaaatcatcttcaacctttttcacctgattaacgtgaaagctacgagttgaatcagtatcaatttcctggaaaaacatgcagtcagggttctgctttttcattgtttgaatgacaccattagtggaatcaagaactgcttgtttagatattgctgtccctcgatgcccctgcggtttcttgccatccttcaactgacctgaatccataaagaagtcgaaatcatgattataagcaccaaagccaacattataagtcgttgtcttatagctacgcccccgcttttaataactgagactgattgttattaattttcaatctttgattatcaggaattcgataataatgtagagacaaatatatataatagccacagaagataattacacatgccagtatcactgacaacaacgctaatcccactttttttaagactttcatatttactcttttctaactgaatcatttttagctttacttaagatattatagtggtgtaattattaaaaaagaacccacttatagtgagttcttcttattagtcatgaaaatcaattgtagtcatagtaaaatttttaagccgaaaataattaggtacttgttttctcctcttcggcacacttccaaattagactttcgtttctcttaagaatatctagattatttctagtttcagaaggtgtaaagtcgtagttgtaaatttctttataatcaggcaactcatatctggcttctttaaatccataatctgtcggttgttcaaagtggaccaaaagctttttaccaccctttacattatcgtctaccattatttgagaatatgtaattgacaattccccaggaaattctgcatatggatacaacatgtggtcttcctatacaattttataatctgcagtatagttaataggctaattcagatcgacaaatcaaaaatttattaataatatctactggggtgtttttcttaaaagttaaagcgacttctgtatgctcattattagcccactcttctttttctatccaagggacaatatgatcattaaaatatagtgtttctttattcggcattttcaaatcatttagcacttgcattttctagcatccccctaataattgtattcaattctttatcacacgtatttcctatcacagaaaactcagctactacctcatttattttatgttctttaaagtaactatcttctgcatacgaactgattactttcctaagataaccaggatactgtagccttatataatgctcaagtttagaatcaaaaaacatctttgcttctttaatatatatcattatacttacttttatgtactttataaaagcttttaactgcatcccaatgtaatttatatccatattcatgccacaaaattcctctcatatctttagcaacgaaataacttgactttaaatgcgatttaacaatttgatgagtatagatacctttattaacataaataacatctttttcgcgatcgtaagcagctactaccttcaaatattttgaactaactattactaaatcaggaaacatgtatttattgtcatcttgtagtgaatccattattaacttagtagcctttctacttttcttatcatcattttctctccaaactttcaaattattgttgttaatagccaaatgagtatgaacacgacacacttgattttcaatatttttaaaacggtattccttcttttgagctaaaaaatccatataattcctttccttattactcaatagtcagttcattagtctgcccaaacacttttacaattatatcaaacatatgttttgaaaggaagtgccataattttagaaatttattttcacaacaaaaaaggcgatatcacaaagatatcgcctaattctatattttattcacttttaatactgtagatcgctaaattgcttgttggagttttgcttagccaaggcttcgctcttccagtagacagcattagttgttcccttagagttagctgaaacaattacactttgaccattttcagtatgcggtgccaaatatgtactgccttgacctggttcttgacccatattagtaaaactatagaaattaattccattaatagtagcttgtttcatatagcctgaactagttgatgaacctgaatttttagcctttacatccatgctaaaaccagcttcatcattgatcttattagcagttacagtcaaagtatcgatattgccattgccagtatctgcagtgtaccaagtaccttgcaagcttgatggaattacggcactagcagattccttagcaccagctgcattgtcattatcgccttcaagtttaacatttagtttggcatttttagccaagctttgaactagatcaacatcattatttttattaatgtaatcaactacatcttgtaaagttacagtaccaaggtttctttgcttaacaaaaatagtaattttcttttgtgctccatctccgtttagcatgtaacgagcattactgcttttaccggtaccggagacctcataaacatatcctgagtcatcagaagtaatacctgttgcggctttggttctgaacgcaacacctaaattaccatttttggcagcattaactgcaatttcccaagtgtcgccatacttttgtgcagcatagacagagattgcactagcctgcgtcttatagtccatattctcagcagataattttgctgagttttgactgttacttgattctgaggtgccagttttttctgagttactcttagaaacttgacttgatttttctgactgtgattgtgaattactattaccttgtgtactttggctacatcctgctaaagttaaagcagctgaaattgcaaccaaaacagttaatttacttttcaaaaggaatccccttttctttcaataattctatctctttgcttaatagtattataaaaaatacgatccgccaacttcttacatgattattttacaaaaattatacttcttgttcattgcaattattttaatacttctttacaaatattaatttaaagtcttaaattctgcatttcggtgttccttggctatcttggtgctcttccaataagtagccgtataatgacctgtatcaacgctataagttactactgccgtattgccattatctttttggacagaataaagtaagccaaaatcttgagcattcaatgtttgaacatgatagcaatttaatccattaatattttcgatccgagctctagcccactttttcgtttgatctaaggattctgctgctacaccagaattagaaatatgatgaatttcttcaccattaacagtatgatcagtaattactaacttctttcctttatagttgtaccaagtaccccaaagtctcgttggaactaatgctaggccatcgtcacccttaaccccatatttgtcagatgtaacttcagcagccaaagtagtcttagttgctaatttttctacagattttacttgattatgttcacttaaatatgaagctatttcagataaacttgctacacctaaatttttcttctgattataaaaatatacggtttcacttttcattgtataaaaagcattattttcttgaccattgccagttacttcataaatgtaacctctacctttttttatccaattaaaaccagttcgattttttacactaatgctcaaatgatttttcttggcatcactatatgcagtcttccatgcatccccatatttcatcgatccataaattgagattgcactagatttttcagtatctgacatactcttaacaattaatcttttgggagtctgtttctgagtcacaccagatttttcaatagtttggcgattattagtctgcttttgcgattggcaagcagttaaattgatcattgcagctatcaaacaaaatgctactaatgtcttatttctcattccatcgactccaatacattctcattaacacaaaagtatccctaaactaattagggataccagtccagtcattattacaattatatagcagtttgctcttctttgaagagaatattttttgatttttggtaaaagtttatcctactagatttaaaaacttatccataagttcacttatctaatcgtaattagactaattacgattagatatgcttttgaaaaatctatactttacaaaaaaatctcgtggcctcaatcaccacgagattttccaattacttatttatttttaccagttcatgtaacgttgacgttcccaatctgaaactgattgtgagtacttagaccattctaattcctttgattcaatgaagctgtgcattaagtgatcacctaatgagctcttaattaaatcatctttcttgaaggccttaattgcgttgtgaagagtagttggtaatggcttaataccatgttctgctctttcttcttcagtcatttcaaagatgttttcttcaactggcttcattggcatcttttgttctttaataccattcaaaccagcagttaaacatgcagcaagtaacaagtatgggttagcagtcggatcagctgaacgcatttccaaacgagtattgatttcaccagcacttggaatacgtacaagtggtgaacggttcttagcagcccaagcaatgtaaacaggagcttcaaaacctggaattaaacgcttgtatgagttaacggttgggttaccaattgcagtaatggcacgagcatgttccaaaataccattcaagaagtaaagagcagtatttgaaaggtggaattcgccatccttgtcataaaagacgttcttgccattcttaaataatgacatgttgttgtgcatcccgttaccagcttgaccttgaacaggcttagccataaagcttgcaaacaaaccgtgctttctagcaattgcacgcgttaccatcttaaaggtttggcatctgtcagcagtagtcaaagcatcatcgaatctaaagtcgatttcttgttgaccatcacctacttcgtggtgagctgcttcaacttcaaagcccatgccctcaagagtttcaacgatttcacgacggcatcttgcaccttcatcgtctgaagtcatgtcaaagtatgaagcatgatctggaacttcagtagtccaattgccatcttcgtctaacttgaaaagatggaattccatttcaaaaccaatatcaaaagtgtcgaatccagcttcattcatttcaccaagaacacgcttcaagttatttcttggatcaccagcaaatggcttgccatcagtggtgtgaactgaacaaatcaagcgaccaatcttaccaccgtgttcgtcaccccatggcaatactgtccaagttgagaagtctggatataaaaccatgtcactttcttcaagacgaacaaagccatcaattgaagaaccatcaaagcgaatgtcattagtcaaaactttatctaattgactcttaggtacttcaacggccttttcagtaccgttaatatcagtgaaggccaagcgtaaaaatctaacgtccttgtcttcaacttcttgcttaatttcttctgcagtatattgtttactcatagttaattcacctataaaaacaaaaaatattaaattggtatggtcctatgatttattcttatctcctagaactgtttaatacaatagcagaccaatttaaaaaagtcaaattggtctagtgattatttttaaattttattttttgttaaaaaatgtatcacgaaccgcgttaataatagctactttgtcatgcgcataagtcaagccgccctgcatataaaccgcataaggtggtctaattggaccatccgctgaaaattcaatagttgaaccggaaacgaaattaccagcagccataataatcttatcttcatagccctccatatgcacagcttcaggcgttacaaaggaatcaatcggtgagtttttctgtacttcttgcacaaatttaaccatcttatcaggatcaccaaaaataattgtctcaataatatcgcttcgcttctcatcccaagctggggtaacattcaagcccattttggcaaacaaagcagccgcaaaaatcatccccttttcagccataccggtaacattaggagccaagaaaaagccttcataaaagtcatgcaaattgccaatagtggcgccctcatcggtgcagcctggagcagtcaatgcaagttttgcattttcaaccaggtcctttttaccaacaatataaccaccggtcttagctagaccaccaccagcattcttaatcagcgatcctgccattaagtcagcaccatactcagttggctcatgtttttccgaaaattcgccataacaattgtcaataaagacaatactcttagggctgacccgtttaacaaaggcaatcatgtccttaatctgatcaactgtaaaggtctttctggtggagtagccacgtgaacgttgaatggcaacgatcttaggctgatcacgtttaagaaccttttcagcctcgtcataatcaactaacccatcatcggttaacggcacatatgaaaaatgcacgccgcgctcgactaaagtaccacgcttatcatcagtcaagccaatcactttttgcaaagtatcgtaaggctgtccagttaaataagttagcgtatcgccgtatttcaagttacctgctagagctacaaacaaggtgtgagtacctgaaacaaattgaggccgaactaccgcatcttcagtttgaaaaacttgagcatagatcttatctagcttatctcttcccatatcatcgtcgccatagccattagccccatttaaatcggcttcagcgacatcattagcttggtaagccgccaaaactttagccgtattatagacaatttgatcttcaatctcaaccagtttaggtgcgatctgttgatcaacttctttaacaattttttgtaatttttctggcaaattattcatttttccattccttgactttcttcaatatcttttgttcgcaacccggatcatctaacggatcaaaccaaactactggtaatttatttctaaaataagtcaattgacgtttagcatagcggcgcgaagctgtctttaaatcttcaatgcgatgctctagcgtctcttgcccttcaaaataagggaaaaattccttatacgcaattgcttgcaagacctgatactctcgtgctcgattttgataaataaattttgcttcatcgagcatcccttgctccatcatcttatcaacacgcaaattaatcctgcgatatatctcttgacggtcagaattcaagccaataatcaagtaatcataacggggctcgatctgcttttgttgctctgaaaactttttgcctgtacgctcaatcacagtcaatgctcgcatagttctgcgactattggctactggtattttttctgccgccttaggatcttgctcattcaagacctgccacaatttttctgcgcctttttccttgaggtagttttcccacttttgcgaaacgctacgctcttctggagttttctcgcctagctgcatcttattcaataaagcattaacataaaaacctgtcccgcctgcaataattggtaacttacctttttggctaatctcttcaatcgcttttgttgcttgatccacaaaatctttaactgaatactcgtcaaaaacggattgcgtatcaactaagtagtgtttcacttgcgcttgttcttctgcagttgcctttgcagttcccactgccacttcttggtaaacctgcatggaatcgccagaaataatctcgccgttcaaccttttagctaaatcaatcgccaagtctgtcttaccaatagctgttggtcctacaatcgctagtacctttttcatccccatcacctttcttaattttgatacaaaaaaagagcgcattagagttaccccctccaaatgcgtcttcttttcatttaatattttgacttcttagttcgaccatcccaagcttcaaagccatctttaagccaatggatagaaacaaaaccctttttctttaaaaaacgggcagctctcaaagtaatggtctttgaatctgagtaaagataaactggcaagtcgcttctaagctcagtatattgatacttaagcatggtatatggcaagttgcgagcgccatcaatatgcttgcgtttaaacggttctttttcacgcagatcaataatttgtgccttacgcatgccttctttaaattcttcattagtcaattcgccaccaattgatttagcttgaattttattccaagcccagataccaaccatgactaaaataatgactaataaaactaaatctaagacaattaaaaaactcgacataaactaaatctgccctttcataaaaacttacatctattatgataccgctaaactaatttactggctatcatttttcggatctttaagcgcctttttttgttcatttttgacttcaattcgatgttctcgactcaaaatcatcttggcaatcaaataatcatgttggtcaatcagaccggcacgattgatattgtcgagctctaaagccattaattcaatatcccaaattcttttgccaacatgaaccaaaattccgtatttttctaataattgttgtacatcgtagagagttttcattagaaattaattatcattcctgttctaaccgtccaaacaacatatacgactaacactgcagcagccaatacgcgccacttaggattgtaggtcttcattacacgatcgcccaagataatcgctaataagaagccggcaattaagccaccaatatgaccccagatatcaattccaggcacaaaaatatcaagcgctaagttaatcaatgctaagacaaaggcttgtcgacctaaaaaagcaatcattggattatgcaaattgcgcaagccaatggcagtcatggctccaaacaaaccaaataaggctgttgaggcaccagcacttaagccgcgatcagcactgaaagccaagctcattagattgccgccgaccccagctaaaagataagttactaaaaagcgcacatgtcccattaatggctccatatactgccccatgtagtaaataataatggcattagaaaccaaatgcatgatgccaatatgcaaaaactgggccgtaaataggcgccaccattggtgtccagccaccacggcaaaattattcatggctcccattttcatcaagacattggtattctctgagccacctaaaaacacttcaactaaaaagattattaataaaactactaaaattcctaaagtcacaaatgattgtgagaggttaatttttcgttgagtattcatttaatcccccttatcttcgtcattgtgactattttaataaattttatcaggagtaacaattgtttgaaccggaatatcggttttttcgataggccaaatgctagtatcgaacgtcatcttgctattggctaaagcaacagttttaggatcatgcttagccaaaaagcgatcataataacctccaccaaagccaagtcgaacatgcgaatctaaggcaaaggctaaacctggcacaatgactaaatccaaatcattattgattttcgcatcttcatcggcgacttcttccacaccgaatttagattttaccaatttgctcatatacgtatagcgtaaaaagtctaaagtatgattttgatcgcctcgtgcctttgccagataaacttcttttcctttatcccacaaacgagcaattaattcagaagtatctacttctagtggtaaagaagcagttaccccaatcgtctgacttcttctaattagatctgtagacattaatttctctaataaaatcgcatcttctgctcttttttctttagtattggcaaattcttttaatttactgatttgttcttttcttaattctgatttttccatctttttgtccaaaaaacaaaaaatagcaggcacgtaacctgctatcttggtttattacttagtttcacggtgaagtgttgcgcgtctttcaactgggcaatacttctttaaggataaacgttccggatgcttacgcttgttcttcttagataagtaacttctatcgccacattcggtgcattctaaaatgatgttatctgccatttttttcaccacctacacttttattctgactgtactagaatagcatttttcaagctgtttgaccagtattattctttattttgttgaatgaagtttgaaataatcttgtaccattgctttggcaacttgcaatgtgtatgttccttcaccatcagggtctaatcctgggaaaacaaccgccactgctaattttggatttttcgatggggcatagccaataaaggttgcattaatcaattcgatattgtgctttctattagggtgttcagcatcatagtagaaagtttgtgcagtaccagtcttaccagaaattgatggcttaacatttttcaatgggtgagcagttccccaaccatttgtaccgtgaacaacacgatagaaccctgtttgaaccacattaagttccgcaagcgtccaaggaattacttgttggacatttggcttcttattgtagctaatgtaaatcttcttgccatttttgctagttttaccaactgattgcacaatataaggttgcaatctcttaccaccattagcaatagttgacacatattgggctagttgaattggtgtataagcatcatagttaccataagctaggtcaagtacagaaccggaaagaatattacccttgtcattaaatgacttaccttcaattcctgacacttcaccaggtaggtcaacgcctgtcttttgacctaagccaaacatagcaaaattacgccgtaaaatgtcaaaggcatcgtttggcatatgaatgtagctcttcggtacataactagccttaacccatttcattgctaagtacatcatgtaaatattactggagacttccaacgctgtttcagcatccaatgaactgaaagtaccaactggataaactgactttttaactggtgaacctggcaaataaattgccgtatcaggcaaagtattggtttcgggagtaataaccttattaattaatccaccaccaacagtagcccccttaacaactgatcccataacaaaggattggttaattacacctaaagcattatcagtcgttttaccagtgttcgtgtttcgattaatcccggctacagctagcaaagcaccagtctgaggattcatcgccacggcataggcaccattagagtatcttgctgcaccgttaccaacagctgtactgtaaacccgtttcaaagtagcctgtacttgcttttgatacttagcgtcaatcgttaacattaagctggcaccggcttgaccattataaacagtcttagtctgctggatattaccattcgatttagtaataacctggttagtcgacttagttcccttcaaaagtggctcatattctttttcaagataggaagtacctacccggtcgttacgtgagtaaccatttcttaagtagtactgcaagctatcacttggtaaaccagatttttcagttgaaaccgaaccaatgatactttgaatagatgaaccatttggataagatctttgccagtcagttccgatacccacaccaggaagctctgataagtgctcacctacttgggcaatttcacgatcggttaagcctttattcttgatataaatcgtggataaagtataagcccctgaaatcttattaaagattaaagccgctgttttttgccgagtggttagttgaggattcattttttcaacataagccaattccgcttgatagatttcagctgaagtcttcttattgccatcagcatcaatcttggctgacttcggcaaagcattagatatcttagtattattatcttcattagctaaataataatctgctgccatttgctttgtcggcttttcatcgctaatcttgatataattactcaaggcattagatatcttgtaaatatctgctgttgtagtcgaggcactcttagtataagtaatagcattggttgctttattacctactaaaacgcgtcccttagcgtcatacatgacaccacgtggcacttgatgcgaaacaacagttgaatcagttttttgcacttctgccttgaaacgtgaaccataaactagttgcaaataagccaattgcccaattaacatggcaaagaggactaaaattacccctagaatgattcgcattctaattggagttgaggaatgcttgtttgagccagtcccactattttttctaaaataattcacgtaaatcacctttattaaaactagatgtattttaacaaaaagtaaacatcaattctacaattcataagggagcttatataatttttaatgatgcttaaatttcttaactcacgacacattgcaattaatcgtaaaaatatttttttctggcttagttttttgctaccggctttgattttcttgagttactttttctacagcaaaaatggagtgctcactgtcgacttaggtcaacaatatgttgattttcttgccttcttcaggcgaaatttgttctcccatcccttgcgcttaatctattccttttctaatggtttaggcggttcaatgctagcaactgatgcctattatctctgcagtcctttcaatctactcttatttttatttccgcaacattttttgccacaagcaattttaattattatcgcattaaaaattggagcggcgggactatcttcctactactattggaagcaaaaaatcactaatcacttttacgctttagcggctagttcggcttatgccctttcaggctacgttattggcaatcactataatctgatgtggcttgattctgtgattttgcttcctttattgattaatgccatcgaccgcttgctggcccaacgaaaaaataagttaattttaattacctttttgctttggttcactaatttttataccggatttatggcattagcctttggtttgctttatctgttaagcaaaattttcttcatcaataagcaggagcgcctacgccttaactggatttatttaagaaaaagtatcgctggttcatttttagatgcctttatgctcttccccgttctgattgaaatgttgcaaggcaaggctagttctactgcctcatggaatttgggctggcagttttctccagttgaacagctgactaagttagccgaaggggcctataactttcatgaaatgcaggaagggatgcccaacatttatctgacaatgcctttcttgttgctgacaattttatattttttaagcaaaaagattaactggcagcgtaaattagcaaacggaattttactcattttcttaattgcttctcttttttggacaccactggttttactctggcatttaggccaattccctgtctggtatcctggtcgtttcagctttgtgttgatcttttttgcgctaaatctaggcgttattgcattagaacaaaaagaacgtatagcttattggcagaccggacttctgactctattttctttaggtttaattgtttatatagtatttaatgcctcacattttgactttctaactgaagatgcgcagattgccacgggagcttttctagccctcggaatcttgtttattggctttatttatcatcaacacagttttgccgcgccatttttttatttagttatcgagcttgagttaatcgtcaacctagtactatctctaggcaatttagcttatcaaaaaaatagcgattatcagaactttaccactaatgtcagccaagcagtacaatacgcaaatcaacatgattctggattttaccgaactgaaaagactttctatcgttctgatgatgatccttttagcgctggttattacggtttaagtaattttaattcgatttctgatcaaaaagtactcaacctgatcaacaatcttggatttctaaacaatagtaattcctacactaattttggcggaactactttgacagatgatttacttggaatcaaatattatcttttgcctaatgatgaaatcacaacgatcaagtctggtaagcaaatgaagtatgacaattccaaccaccgcgttgatgccagcgattatcatttgcaaaaacgcttttcccaactatatctagtgaaaaataatgccgctttgcccctactctttttaacatcacaaaaaacgcaaaaaatcaattttaactctctagatattactagtaatcaaaccaaattctttcaagcagttacaggggcaaaagtgcagctgtttaagcagatcaattggcctaaagcaaaattaattaatgtaactagtatgaaaaacgatcaactacaatataatcgtaaaaaaaataagcaaatcgcacgcatcattttcaatttcaaaccacagactgatgattcttactacattgaaatgcccggtgagatcgatgataatgccatttcaatgacagttaatggtgctaatattaatctggcagtacgtgatcaaaatgcccgtctcattaatctaggtagccaccagcgtggtcaacggttgcaagttacttttgaactaaaaaaagataaactagaccttagtggcattcacttctggcgcttaaacacacaaaagctcgagcagattatacatcgttttaagcaaaaacaaccaaactttaaacaaacacctgctttgatcatcaaatctaatcatttcacaacgaagaagatgatgacattggcgtcaactattcctaataacattaactggttagttttagataatggcaaaataattaacaagaataaaaccttgttcatgaatgcttttttaaacttcaagttgaatccaggaaaacatcaaattacattaatttatgtaccatgggttcttctactggggatgttggttagcttaattagtttaacaattttattaatttgcaagaaaaaagccactgttagcgctaacagcaaaacttttactagacctactgtataaaaatataatacaatgtatacgttatcattcggataaattaatatagaaagaagatttacaacatggctcttaaataccaaattggtgttgatgcaggtggtacccactcaactgcaatcgcatatgacgaaactggcaaggaaatcggtcgtgcagaaggcggcccaggccaaattaacgctgactacgaaggcggaattaagaatatctctgacactatcaacgaattgatcgacaaggttgatggtgactgcatgcgcgttcttgttggtattgccggtctttcagttgtcggtaatgctccagaagttgccgcaactatttcatcaagaattaacaacttacctactcgtgctattactgattcacttttagcactttacgctggtcttgaaggtgatgacggtgccttagtaattgccggtactggctcagtttacaacggtttacaaaacggccacttaatcgcagttggtggctacggcaacatcttaggtgatgaaggctcaggttacgcaattgctcgttcagcaatgcaatctgctcttcttagctgggacaagcgtgaagacaacgctttgattcaaatgtttactaaattatttggcgttgaacacatggatgaatgtaacgctaaattctacaagatgtctaacccagaagttgcaggaatggctgttcacgttgcacaacttgctgatgaaggcagcgatgatgcaatcaaagttattaagaaacaagctcatctgttagcccgtgacatcatcatcggtcttgaccgttacgaagatcctaagccaatgaagattgctttaaccggttcagttttagctaacaacgaaatgcttagaggattggtagaagatgaagttaagaacaagtaccctgacgctatcttctcaatctccaacggtgaaaacgctcgtgccgtattgttcgacaagagtaaggactaccgttacttcactaaccacgaagaccgctaaattatcttttctgaatagttacaaaaagctcgaagttactacaatttgtagaagcttcgagctttgtttatgtttaaatttctgctggtgtattacgattaaagatataaatgtcacttttagttttttcccctagtattcataataagactacctataatcttttaaaattcttttaaaagcaaacgctaaaaattgatattttgtatttatagtatatagtactatatagataaagtaatacgttttgtgaatagaggttgtactatggctcaaattagtgtaaaaatcgatgataaattaaaaaaagaagctcaagatattcttgcttcatatggggttgacatatcaacaggaattagaatgtatttcaaagctattgttagaagtaatggcattcctttagaactaagacccatgacagaactagatgaagcgaactatgaagctgataatcacatttatcatggaagttatagctcttttgaagaatacaaaaaggccatgcggaaataatcatgcaagttaatcctaccaagcgctactaccgcgcttacaagagatatgaaagaaaacattatccaatggattatgttgatgattgtgttgaagcaatattaaccaatgacaaagaatttctagccaaacataaagatcaccctgtaggaaaaaatcgcaaaatgcacgttaatcgtcaatataatgacgattggctattgtactaccggattgataaagaaacacatgaactaatcctagttttggttgcattaggaacacatgatgaactagatcgatttgccaatatgtaatagcatgcgttgtattgaacaaaaacagattaatgcagagctcgaagttactacaatttgtagaagtttcgagctttattttgttccaatcacgctaatgatgttaataataatttttgcaactgtaacttagctgcatcttggttagcctgttctggttgctcatgattcaattgacaattctcaagataatcatcaatacccgctttgaaatctttcttcaactctgccagagaatttccttcataagaaataaaagtattttctagacctaagacttcgccaaataaagtatcattttcaacttcgataagtaccttggtaacctttataagttagtaggctcatagtcttatacctgccattcttaatccattcttcaacgttcttaattgatattgtttaagcatatttcgaggatgtggtttgtgtaattaaagattattcacctctcttatatattccatcactgtacaaaatttggaattcaaaatttaggcttgtctcccatcatttattacgcaaaaaatgtctaaattttttgaaaaaagttaatttttcaaatcaaaacaaaagaatcattacatgaactacatttttgatagcgaatacaatatttttcgcttcaaatacatagaatttctttcctttttaaaaaaattctttaaagaggctgtttccccttgtaaatacgcggattactgttaaaataagtaatcgtagtttatattaaaagaggtatttttcatggaaactatttctaagaaacaattagtagatcaaatcgctgcaaagactgatgctactaagacagacattaacactattttggacgcttacatcgacgttgttaagagcaatgttgctgaaggcaacaaggtacaattagttggcttcggtgccttcgaacttcgtcaccgtgctgctcgtaagggtcgtaacccacaaactggtaaggaaattgaaattgctgcatcaaacgttccagcattcaagccaggtaagagcttcaaggatgaagttaacaagtaataatttattattacaaaaaagaccgcgagttttctcgtggtcttttattttgcctcagaacctgccattaacaagacttttccctgctcagtttcgatcatctcgcaatctatgccaaagttttgcctaatcgtctgcgccgtaattacctcttctggcctgccctgcttttgaatcctgccttggttgagcaaaattacctgattactatattgcaaagcctgattcaaatcgtgcaaaatcatgcaaatcgtcaaattctgctttcgattcaattttttcactaaatccaaaaagcgatactgaaaatgcaaatccaagtatgttgttggttcatctagaaaaagatattccggctcttgcgccagtgctgtagcaagccacacacgctgctgctgaccgccagataattgcgctataaacttatctgccaaatcagcaatctctagctcctgcataatctgttgaaggcgagcagatccattttcttcatcccccatcaaggaatgatacggcagacgccccattttaaccagttccttgacagttatctgatcatacaattgattctgctggtggacaattgctacctttttggcaaaatccttcgcagctagctgccagatatcttgcccatctagcgtaattgtccccgcagacggccttattgcccgtgtaagcaagcgaaacaaggttgacttgccagatccattaggaccaattaaagtcgtaatctggtgctcctgcaggctcagagagaattgattaaataattgttttgacccatatgaaaaatcaatctgcgacgctttaagcatttttctgcctcttccataaaattaaaatcataactggaccaccaacaatagccaaaataatattagccgcaatctcattcggtgctgtaatcacccggccgatggtgtcaacgaacaataaaaaccaagctccagcaaaaatcgaaaatggaatgattttttgataatcatatcccaaaagcaaacgagcaacctgtggcacaataattccgataaaagctaaaacaccaatgcaagccgttgttgttgcggccaaaaccactgcaattagcatcaagactaaacgcagggttttagcagaaacacctaaagacgtcagctcttcatcattgaccttcaagtaattagcccaattcataaaacaaatcgcgaaaatcagccctactacgccaataatcaataaatacatcgtcgatccccaactacttgtggccaggctgctgccactattttgactattagtgaaaacttcctgcatccccgtgaacactgcattcaatgccactccgatgataattaactgataaggcgtcatctttttttggaataataaaagaagcccaaacgctagcagtccgccaataatcgcgaaaataattttaccaaagaaaatttctggcaaaataataaccgctagcaattgacataaactggctgcactagagatccccataattccaggttctgcaatcggattgcgcaaagttgcctgaaaaaaggcaccactaacagagaggctagctcctgctactagtgccgaaataatccgcgggacacggatattaaacaaaatattcaattggctgttagtcatcttttgcattgaaaaattgcttgctccgtgagttaatgcaaagaaaatcgtactgattaacaaaactgctaaaatcaagtttatccaaattacctttttcttcattttgatcactttccagggtacaaccagttgcttaatttattcaatgcttgagaaacattcatgttagctgaagcattaaagtctggttgctgtaggtcataaactctgcctgtctttacggctttcatcgtcttccaaacagaatttttcttaaactcttgcttaaattgtggcaaagttacatttggtaaagcatgttctaatcgcaaaatgacatctggatttttagtagctagcgagtcattacttggtgacaaataaatctgactatcagagtgatagatattttccccaccagctattctgaccaaatcacctaaatatgatcgattagttagaatcatgtaattagcgccaggcaagcccatcaagatcaatactctaggcttacgaccgtgaacacgtgctttagcctttttaacggcttttttgattaagccaatctgataatcagcctgtctctgccggtaatactgcttgcctaatgaactcagtgtagcttcaaggtcagctactgaatccagcttcaaatatgtaactttaacgccttgttctttaaatgattgatcatactgatcttttaaagttgagactgcatagacacgagtgggattcaaagaagcaatcttttcaacacttggcttcattggactcccaatcttgggcaccttttgatagcgtgctggtaacttagcctgcgtctttggaacccctgctaaattaacgttcaatttatcaaaaatttcagtaatcgctgcacttgtggcaacaatcttttcattattggcaactttttgatcaatcaatcgtttagcaccaattgccactccgacgattgctactaaaaatataattaaaccaataattaatcctttacgttttttcatttactttttctttccttggcatttacgacaatcaaaacagcaacgccaattaaaattaacgaactaagcactccagccaaaataacataataaaaatttcgctgcctttgttgattagcacgttgattgcgtgcattctgcgctatttgcctgttagctattgccgcttgcttcttttgtgccaattgctccttaggcttaacactcttgtttttcacctgtggcgcgctgcgttttatcgcactttccgcatgacttgctcgctcttttttatttgttaacttaggcaactgtgtagtgtcaaaagcaaaagtaatattgtgtgttgcttggtaaacatgtggcacatctattttaatttgactagaaatatcacgttttaaattattagtgcgaaaactatagcgataatcatagtcactgccatgccgcgtttttactacgtttagcggtgcttgtccatcaatcgttaacacctgaaccggatagggacttagatctttcttagtgcgaatcgtcatcgttaccaggtactgattgtcgtctaccacaacctgagcaggacgcgcatagtagccatcagccatcgaggtctgatgcgtgccatacttgtaagtgcgataactcacgctttgtgcactaacagtcacaccaaaaataaacaaacaagttagcaacaagaaaggaaaagagataattttagctatatttttcattatttctttctcttcaaaattttatttcttaagtaaaaggccaaaccaataattgcagcatcaaatgctaaaaagcctgcgatcacaggcaaaaatggatattccaccgctgcaatcgtcgccatctttttcttcttgggtgtcatctttgccccaggttttacactagagtttgaagaagactgctgctttttaactggctttgactgcggttgagcgctacttgtagcattttttgcatctttactactgtcgtcattagctgcagtaatagcatcactagtactacttgaatcagtgctactatttgcttcggttaatgccttgcttacagtcgaactgtgcgccacattttttacaccaaaagcaaaccagaccttaaacaaacgatcatgaatattggcaattggtacgctcaagcgcagactcccctgagcctgcttctttaactgatttagcgacttgaagtggacctgataagtccagatatccttgccagcttgtttggtaaaacgcaggtttgaaattgaaccaattcccagtgaaaccggctgaaatttggtcaccatcccatgctttacctcaacttttaaggtcataacatagccctgctttactttttcaatcctggcatgatgcgtgtaaaaattatttgctgcagaaacgccactgcgatccgccttatagaccgcataattgatattttgaacctttttatctgcgctgaccgtgtgtacttttcttactaacttttttgacgctctttttactagccttcttttgcttcttgtcggtctttttcttgctagtagttaaaccgctaaccttgtcatacttcacccaagcttgttcggtcatcttaccaccaaagtcaatagtgacttgcatcttgacccaaccattatttttgaaagcttttcctgcaaaaacaaagtcaaaactagatttgtcggcggaaacattttcctttttaccgctaacgccattaatcttgagggattttacaatcttatttacgttttgccccttgcccattggactatttttaccatcgacatggattgtcatcttagtcacatgcttttgactaactgttaattgcaccttatctcccacaaaaccttgagccattgacttagcatggctgcggtgatttttactgtatttgtaaaccgtcattcccactgtcttttgactttgttcagcggccattacaaccggattagtttgcataaatgccactccaggtgccattaaagtcattgcgaccgaactacttgcgattaacttaagtaactttttattcattctaatatccttctttttactattaatactattagtcttttctattataaagttcttaaaataactatgcaatcggtttcaagatgatattttagagactgtaaaatagtttgtgtaaggatgaatgattccttaaatttatttctttaaacattagaaaaaggagttcctttctcgtatgattggtttgaacaaaaaaacacatacagaaagaagaactccttcatgaatgattttaccaaagattttgctcaagctctattcaatccagacaaaataaatgatttattgcgcaaagagctacaacaggctgttaataacttgttagaagctgaattgactgcctttctgggctatgatccctatgccagaaatggctggaatactggcaactctagaaatggtgcttatttccgcaaagttgatacgcaatttggcccaattgaagtgcaagtgcctcgggatcgcaacggtcaatttcatcagcacacgctgcctggctacaagcagcactcggatatcttggaaagcatgattatcaagctttactccaagggcgtgaccaccagggaaatagccgatctaattgaaaagatgtatggcagccattacagtccagctcaggtatcaaatatttccaagcagatgattccaaaggttgaggcttaccacaaacgcaagctaagcgacaagtttttctgcgtctatttggatgcgacataccttcctttgcgccgagaaacatttgagcgtgaagcagtctatattgccattggcatcaagcctaatgggcacaaggaggtcattgactactgcattgcacctagcgagaacattgaagtctggacagatatgcttcaaaacatgaaatcccgaggcttaaagcaagttgagctttttctttctgatggtgttgttggcatgaaaacagccttggccaggacttatcctaaagctcattttcaacgctgtttggttcatgtcatgcgcaatatctgcgctaaagtacgcgtcgacgatcgtgaaaagatcatgaacgaattcaaacaggtgcatcaacagacaaacaaagaagaagccacagctgtcctgcatgacttctataccaaatggggcaaggtttacagccatgttatcagaagcttgaaagacatagaaccagatctgctggtcttttataactatcccaagcagatcagagcttcaatttattcgactaacatgattgaatcatttaacaatgtgatcaagcgcaaagctaagcctaaggcagagtttccaactgaacagtcgcttgatgcttttattggcattcaggcaatgagctacaatgaccgttatttcaatcgaattcataaaggctttggtcaggttcaggacaccttagaatcctactttgattaaataaataattaaaaaatcaatttacgagaaagaactatttacacaaaagatttgacagtttctacaaatttgtcattatacgataaaaaaacaattattaaaatatggttattttattttcaagtagctaatgaccttatgaaggcaatctagattccttatttctctgcaaaaattgtttttcagcgagaagttttgcaaaaaacacagccaaaatgtatcactaggtttggttatatattttttctataaaaagatttattttttagcccggatttaaaattgaagtgcaacactaagtgttaaacaaaaaggccatgaagacctaaacttgaagtgacgaaaaatcaagaaaggaagatctttatgaccaattcaaattctagcatttctaagcactatcatcaattaaccagcgtacaacgtggacaaattcaagcaatgctggattccggcataacttcccgtactgttatcgctcaagaagtcggctgccataagtcgacaatcagtcgcgaaatcaaacgcggaagtgtcctgcaaagagacagcagctatttattgtatgagcactattacgctgatactgcacagatttattatgagaagcgtcgcaaaaactgctatcagcgcaatccattgaagcattatgctgtctttttgagaatgctctccagacgctttaaagctaaatttgatgccaccagcatcgatgaattcgttggtgaattcaaaaggactatgccaggctacccttgtcccagcacaccaactgtctatcgctatattgatcagggcttgctggacataagcaatattgatctgcctatgaagctcaaaagacgcaggaacaagcgtcatcacggccatagcggtcatgctttgcacaagaagcatcttggcaattccattgaacagcgtcctaaagagattgaagacagaaaaacgccgctgcactgggaaggagatctggttaaaggcgtcagacgcaagaatcagcctgctttaatgactttgaccgaaagaaccacacgctttgaagtagttatcaagattcctgactatcgggcaagcacatgccaaaggctgcttcaaaatgagattgacagacatcctgcctggtttaaatcgatcacgtttgacaatggctctgagtttgcggatatgaccgagatcaaaggctgccagatctacttcgcccacccatattctccatgggaaagaggcaccaatgagaactgcaatggacttctgcgtcaattcttccctaaaggcaaaagcatgaaagataagtcagctgcttatgttcaacaggcaactgatgccattaaccgcaaacatcgtcgaatccttcaatatcacacagcagaggaactcttcaagcaatatatctcttcataacctaactgttgcacttaatttgacaattcagggatttattttttagttattgaatatttaaataatgtttcgatagtctatttacatgctaaacggtcattatgatgctttgatttaaccaattcttatgctaatcatgatcaaaaaattattcatcatcaatgatcaagaccagatcgtgcaaaaaattaattctaaggtcagaaaaggcattcatcatctcaacgttatccttctactaattctctaactatattgtagttacttgcatcatctgaatcagaaatatctgcactagcttttctctcatttttatttactctttattttttgcgcttccaatcttatcttttaaatccaaagctttttcataaataaagaaaccaattacacatgtcaatatatcactaattgcttgagaccaaacaataccgtgatagcccagcgtcatcttcatcaattctagaaccacaaaataaatcacaccttgtctagcgattgccataataaaggcaccccaagcattaccaacagattggaaaacagttgtataaaccaatgcgattcctactacaggcgtagtaacaatcgtagctaacaacatgtaactaccggcactaacaatatccggctgattcatgaataatgctgtgacaggacgggcaaaaacaattaataatccaccaacaattaccgcatatacaacttgaactaaaatatcaaagcgaagaatatctctaagccgccgccaattctgagcaccatagttgtagcctaataaaggttgtgcaccaaaggcaaaaccaacaatcaccaaaatcacaattccatatattttttgtgtaatccccattgcagcgaccttatcagcaccataaattgccagtgacgaattcaataaagccatgccaaagctttgagcaaaattagtaattgatccaggaataccgattgctactacttccttgattgattccgcattaattttaattaacttgggatctagagtaatgaatcttgctttttgcagaatcataattactaaaatcaagtcagttacaacataacctaaaatattggcaattcctactcctgtagcaccccattttaaaacaaataaaaaaattggatctaaaatgatagctaaaatagttcctgtcattgtggcaatcatcgcctcaatcgctaatccctctgttcgaattaagttctgtggaataaagctcagaataataaagactgctccaatggaaagcacacgataaaaatcagctgcatcgttataagttgccgccttggctcctaatatagttaaaataggatgttcaaagattagcaagattactgttaaaaacagaccagtaatcattccaccatacaagcaaaaactgctgatttcgtaattcctgcaactagattagtatcgcctgttttggcaacaaacattgtatctgccagattataaatcatggtagtgatcatacccaagactacaggtagtgctaatttaaaataaacttgcttaattggtgcctttgcaaataaatcttccatttgtttccctcacaagaaaaagcaacctagaagattcttcgggagtcatcctcacgattctaagtcgcttatgttacttgatattcatgtattatatgttaatctaaacaaattctttgattagatgcaatggcgtttttaattcggtaagtgtcattgttttttgtttatagcatcagagaaatctccatctatgctaaactattaccaaaatattgaaggaaaactattatgcaaattaaagaaattatcaaacttaatcaatcaactgagcaagaacttttaaccatctgggaaagcagcgtccgcgccacatataaatttttaaacaatgatgaaatcttacaaatacgcaattatgtaccacaagcgtttaaacaagtggagcatttattaatcattatcgatcatgaacaaattaaaggcttcatgggaattaatggtcaaaaagttgagatactcttcattaatgccaaagcacgcggcaaaggatacggcaggaaattgttgaattatggtatgcaaaagttaaacattgatgaattagctgtcaatgaacaaaatccaaaagcagttggattctatgaacacatgggatttaaagtagtggaacgttcagcaactgatggtcaaagcaatccttatccaattttgaggatgaagttggataaagaaaagtagtaaacagttacgcgtggtgctagttaaatctttctagacaataagccaaattataagctaaaattgcaatttccaaccggctttgaaagcctatcagactacgtgctcgattgttctcggcattgtaataggtcagaagcgaaaagtcgctttcaattgttctgcgaatagccatcaattgatgatcattgtgctttttagctcctgtcatatttttacgatatggtgtccaaagttcataacccatttgttttagctgttgatgcagttctttgcctaaatagccttcgtcgccaagaagatagtaattagatggatgggcattttccagcagttcaactgtctccttggcatcatgaactgatgcttttgttacgacataatcaagaatgtaaccgtcatcgctaacaatggcatgaactttgaaaccatagaagtaaattttcttggtggccttataaccaatgttggcataaccgcgaaaaattttagcacgatagttgcgaattggttggcaaacaggtaccggaaagctgtcaatgatcaagaaatgtccattcaggtcaacctttttattcatttcttgccgtatctgataaatcaattgcaatagctgacgtgaacgccgattaaaacgtgagtgtgataaacaattgaaacattcacagaatcttctttgtgattcaattcctgtcttagcttgccagataagtaaagccaaaatcagactgtccgtagttttaatttgatcaacatttcgccgatgagtaaactcagccggtgcatacaaacgataccagtgccgacaaattatcactaaatctttaaaactaacttgtaaatggtggctaaaacgcttaagcttaaggcagttcaatcagatcagactcttttctattattactatttacaagtcgagtctaacaagattggacttttttattaactaaaacgatttaactagcaccatgcgtaaacagttatatttagttattcctttttcccttgacaaaaatatttttaattttcgagtaatatcatttgtctaacaacccattcttctatattatagaagacgctgctgatacggatgtataacggactgataatcctttccgtaaattgcctgtaagtcagataaggcgaacagcaaggatacctgctgttttctgaatcttggagatattcttatcagagataggtccaaaagactttctgccaggcgatggtagtcaatgtatttcagcgtaaggctttttctgagctggcaagcacaataagttgatgtgaaaatcagcttgcatcagggtttttgacctaatattaaggtggaaaacttaattggaacctcaatgtaatgaccaacaagcttgtttgctgtgacgtatgcgatcaaaagcatgctataacaggtcagaaaagaacgagtagcttaatcggcaagattaaatgatactattaggtacaatatatagaacgcacatcaagtgaaagtttacggtaagcaatccgtttaggacttcggtaggttctttgaacccaacgcaagaaagaagcataaatagctaatctgtgggcggtcttgttatcctatggctgaataaagaaaagaaaagtatgaaaagcatattttcctaacgttggatgcaaaaatgattagttgctaataacaaccagtagcattaattaaaaggagaccggtttgtctatgaagacagctggtctctttttaatattctaattattttactgtattatcacctgacactgtgtgcatccctaagtgactgccatttgtctccttacctacctatgcatgagttgccttaccaccaaagattgaattatcaccgactacagtcttcaaatcacattgatccacttcaatattttcagccaaattatcacctgaagtcgttgccacatcaagatcatcaagaatttggctatctttaatggtaaagtcaccgctaactagcttaatcttaccacgatttagcaataccttctttaatttaatatcacctgaagtttcagttattgcaacttcatctacttttactttcttcaaatgaagatcaccactaagagcagtaaatgttactgtctctaactcaacttgttttacaacagtgtcaccactagtcaacttcaaagtagcgttaactaatttatgttctaccggcactgtaacttttaatgcaacaatatcatcttgactcacaatactgatttcaacatgctttcttttccagaatttaccattcttgcgttcaaccttaggttcttttaattcaagagttttacccgcattagtcacaatcggcctcttatcttctggaccgtggtaatgtacctcgaactgatcgccaccaaccaatgtaaaatcaatatctactaaatccacgctcaatttgtcaaagctatcattgcttaaaactttatcaacaattttcacttcattgtcttcatttttgtcaaaaaacattttctttctcctcatttttaccttttagctattattcttatttttctttaagtttactatcatattgctatttttcaaccgtaatttactaagtggtcaaaatttgcggctgaaatgcaaaaatagacaacttaagttttaacttaagtcgtctatccttcatcctaaaattttctttttcaattcgtctaaacgatcaattttaaacgtgaacgcctgtatccctaattcacttgcagctttggtattattttccaaatcatcaacaaataaacattcttctggctttaaatcatatcgttttaacaaacattgataaatctgcttatcaggcttcatcattttttcctgtgcagaaaagacaaaaccatcaaaataatcacccatcgaagaatttttaacaaagttagcaaattccatccctgtattagacaaggcgtagatatgatagccttgctttcttagttgatccataaaacgaaaaacaggttcatagaaatctacattttcaggccaagttgtcataatttgcttaaccttcttctgcagctcaacaggtacgcgactaataaaaatcttagtcgcctctttttcatcgatttttcctgcatcaatttcagaccattcttttgattcaaaaatcgtttttctcaataaatcatgttcttctgatgttaattgataatgatataaaatttcatcaggattgtaattcataatgacgttgccaaaatcaaaaataatattttttaacataaaatgtcccttctaatacttttaattcacatcttaattttatgctttcttgtatcactgcgaaagaaaaataaaaattgactttttctttttatcaaataaacacaggataagtgaagtcattaaatcttttagccaagagcattgtaatagacacataatacagtataatgattattatcaattacataaaaaggatgatgattttgaataaaaaagcattcagcctagacggcaatcaattaaaaactttagcagttgtgtttatgatctttgatcatatctacagctatcttctattggatattctaccaaattggtgcagtttaattgctcgcttcgttgctccacttttcgttttcatgttaattgttccccatgaccctggcattgcatatactgcataaaagtcattgccagtaaacttttcaagatgcgttttgtctttgccaaattcatccttacctgtctcagtagcattttgatattttacaaaagtatcttttagactatttgcatcaatcttcaatttattagctagttcaacaattgaattggcatgtacatatacttggggattttcttctactttatctagtttttccttaaatgatgaatccatttttttgccatcataaatcaaataatacttttcacttccatgcttgtacatttccgttcttaaattcaagaaattatatggtgcctcattagaaaaacgtttgccattctcatcaattaacattgtttttgaataatcaggtacagtattccaagtgataaataattgtggggcaaaatcaatcgttccattcttataaacatcattatttgaaaactctgcattaacagctttcagtaaactataaccatcaccagtattggcaggactagcttcgttaaagacatgaaccttagcaacagatggtgtgaccttattaagaagatcatccttttcataagaagcaccgcctgtggcaattactacagctttagcactaatagtaaattcacctgctgaatttctcacttgcaaccctgatactttggttccatcatctattatttttgtaacccgactgttcaaataaaacccgccgccatgttctttaatgtaattagccagcatttctactaaatgtgcgccattagtgaaattagcaataataattggactatcagaaaaaatacttacttgcgaatttgttaaggctactaaatcatcgaatgtttttccagactcttctaacaattgttttaagaattttcgatcgtgctccttagttgcatttttattaacatgatcgacaaagttcaataaccttatcattgtcggtagctataattacagtcgcattattaatttgctgctttaatccttcttcactcgggtaaacaccccaatgctagtcgggactataatcatccgttttttgatcaagacaaacttgtttgtaaaaagcacaaacttggcttaaatcttgaacagtagcagttcttatttgcaaaaaaatcccccttctattctatagttttcgattataacaaaaatgcatccccttcccaagtaggatgtggacgcattcatttaatctatattttattcatcaatcttaggggccttgccgatttgagcttgcatcatccagattctcttttcaatatctgtatggcatgacgttaagatatcatttgagccatagtcgccttcctcgtcacttaccttgatcccttcttcataaaggtgctccaaataacgataatcagcaatgatagtcgcaaatctttctctagttgaaattccccattcaccaggatgagcttcgatcttagtatgatcaagcacttcctgtaagcttgaatatggtgacccatcaattgtaatcaatctttcagagatcaagtcacgttgttcatcaagttcatccattacctcgtctaaatatgggtgcaattttaaaaattcaggtccacgcatataccaatgttgttggcggacaaccatcattaattgagtagtatcagcaacagcttgatttaatatttctttggttttaggatacttcataaattagccctctttcaattagtaacttactttatataactattatatattttgttatcgcttttatcaaattatatgttttatgtaataaaaaatgtgcccgaacaagcacatttttaagtaagtttaaaagaaaattttactcataataatcatgaataccaacaaacaagttgagctaactgcggcagccccaaagactgaaccgccacgcttaaagattaccttgaagttaacggaaattcccaatgcagccattgccatccctaaaaagacatatgctgcttgcactaagaagtctaaagtccgcgcagacattggtaaaaatgtaccaataatactagttaagataaatccacccaagaaccaaggaattggtaatttcttcggtgctctagtatgttctgcttcactttccgtaaccaaacgcttttggtaccaatagcccacaattaaagcaaccggtgctaaaagtaatacacgagataacttcataattagagcgctatccaaactgacttcaccaaaagcacttcccgctgcaaccgcatgagcaatttcgtgtaaagatccacccgctactaccccatattgtgtatcagttaagccaagaagcggtttgagcacgatttcaagtaatgtaaacaccgttcccatgacacaaacaacagccaccgctagaacttcgttttctctttttctgtcttcatcgcttgtctcaatttgtggtgacacgcccataacggcagctgcaccacaaactccacaaccacaagccgacaaaatagctaactcatcttcagcaccaaacttacggctaagccaataagtaagcacaattgttccactaactgccagcgccgcaaccagtatagtcttaactcctgcatcagccaacttagtcaaattgagtctaaatcctaacaagataatccctaatcttaaaaacttgttggaaataaaacccatgccagctttcgcttcagcttgtacgctctgaggcgttatttgcagtgcaatccctaataacaatgcaattaccaatgccccgattaagtttacgtatggcaatttagccaagaaaattcctgctacagaacaaaataaggtcatcgccgtagctaaccagaatgatttagttttaattatgtttgtcaacaaaaatccctccatatgtgatctgtttaatttgacaaacacaactccctttatgatgatagtaataagtatactattattttctattcttgacaaggcaaattattaataaattcacattaactaaaaataaaatattttggcattatttagttaagtaggttataatacttttgttacggagtgttggcagagtggtaatgcaccggactcgaaatccggcgaaccaagttttccttggcgcgcaggttcaaatcctgtacactccttttgtcaatatgtggaaaagaccaagtgcaatgcttggtcttttttatcttagtcatttttaatatttaaatgctacacttgctaatagcacattatttaaagatatagaaaagagattatatattatgtgtacttcaattattttcagtccacaagatcactattttggacgtaacctcgatcttgagattactttcggccaacaagttgtagttaccccacgcaattatgctttcaacttccgcaagatgcctgaaatgaagcatcattatgctatggttggtattgcacttgatgctggtaattatccgctctactttgacgcagctaatgaaaaaggtttaggcatggcaggacttaactaccctgacaatgctacctactatgatgaagttgccaataaagacaacattgcttcatttgaatttattccctggattctgggtcaatgcgcaactgtagcggatgctaaggtattacttaaaaagatcaacattgttaaccttaatttctctgacaagatgcaggcatccccacttcattggttaattgccgataagacaggtgtttcaattgtcgttgaaaccgataaagatggaatgcacgtttatgataatcctgtcggttgcctgactaacaatcctcagttttcatgtcaattatttaatttaaataattatgctgatgtttcacctgcaatgcctaagaacaacttttcaaaagaggtcaatatgaatggctacagccgtgggcttggttcacgcaatttgccaggtgggatggattcagaatcgcgctttgttcgtgtagcttttaacaagttcaacgctcctgttggtaaaagtgaggaagaaaacgtagacaattacttccatattttgcattctgttgaacaacaaaagggacttgatcaagttggccctaattcatttgaatacactatttactctgatggtaccaaccttgacaaggggattttctattacactacttatactagtcagcaaattaatgtcgttgacataaacaaagaagacctcgatgctaaggaattaatcaagtatgatatgttaactaagccaacatttaatcaccaaaactaaataattgaaaaataatgttaattttatttaaagattagcattatttttgtttttccggttaaaatagattgtacttatatagtaattggggattttcttattaatgaataattattttgtactgctactgtctgcggcagttttgctctggcttatttttaatatcaaaaattcacgtcgtttcaatctatttgatcactggcttcaccaccaattggtcaaacgtcatgattgctacagctggcaggttatcgcttttattaatgatcctaaactaatggtcgtttgggatgtattattagcaggcctacttttaaacgaagaacgaaatctaaccgctctttgggtattaggaactctaggatttgctgacatttctggtattattctaaaaaaacttattcggcgcaagcgaccattattacattccgataaagaagatggctatagctttcccagcggtcatgttttaggtgccacaaccatgggcttaatcgtactacaactatttgccaaagatcttggaaccggatttgttattgccatagtagctatttgggcaatggtaattttctctcgtttaagtttaaaggcccactatccttctgatgttcttggtgctactagtttagcaatcgtttgtttcagtatttcgcagcaactatttttagcgatttaaaaaggatcacgttcagcacttgagcgtgatccttattttttattcatgaaagcctaccataatgccgccttcttcagcatagaaactacataaagcatgcattggacgaatagtaatttgagcttcagggtattcctccaatattttatttttaattatttctgcatctttttcattttcgcaatgatcgattatcacttcgccaccgtgataattatcttccttcatatacttaataatttcacggatggcctttttcattccacgagccttagtaagtggctcaagttttccttctttacttgctgttccgatcaagttgattttgagcaaacctgcgattttggctacagctggtgaaacacgaccgtttaaagataaattatgtagtgattgcaaaacaaaaagcaaatgagtctgcattctaaacttagcaattgcttcttctagatctacaaagcgcatttcaccttgcagcattttctcaataccatggactatgattgctagctcaggtcccgcacttcttgaatcaactactataattttgctcaagggatgtttttcctcatacattgcttttgcctgaagggctgaagaaaaagtgccactcatcccgctggtcattgtgacgataatcgctttttctgttccttcaagtgcgtcaagccatgcttgaatacttggacaagttgttttgcctgccacattattttggttcatattggacaaaaattccttcatattcaaatcttgattatcaaggtagtcctcaccaccaaaagaaattgtcagaggcactacttccaaattacgcgccggatcattattcatattggcacttgagtcaacaattaatttaatattttccattttagattccttattttttgtatttattttaatacatatattatagtcctttgatatagagttttttaggctgctttactaatttttaaaatgtaaaccgctttcatatgtttacaccgtcacaaagttaggctaaaatttgagatgtaaagcggagcaaaaattgttccgtatggtatgaaaaacataccataatttttgaggaggtttattaatgctcaaatcagttattgaaaatgtacacgcacttgaaattttcgactcacgtggtaacccaactgttgaagttcacgttactctttcaaacggtgtcgtaggtaaggctgaagttccatcaggtgcttcaactggtgaaaacgaagctgttgaattacgtgacggtggttcacgtcttggtggtaagggtgtttcaaaggctgttaacaacgttaacactgaaattaacgatgctcttaagggtatggacccatacaaccaaccaaagattgacaagaccatgattgacttagacggtactccaaacaagggtcgtcttggtgccaacgctatcttaggtgtatctatggctgttgcagttgcagctgctaacgatgctcaccttccattgtacagataccttggcggtactgatcttgaaatgccacaaactttccacaacgttatcaacggtggtgaacacgctgacaacggtatcgacattcaagaattcatgatcactccagttgctaagacttcattccgtgacggtttcgaaaagatcgttaacgtataccacaccttgaagaaggttcttgaagacatgggttacgaaactggtttaggtgacgaaggtggtttcgctcctaacatgaagaactcagaagaagctttgaaggctcttcacgaatcaatcatcaaggctggttacaagccaggtgaagatatcgctattgcatgtgactgtgctgcttcatacttctacaacaaggatgatcacaagtaccaccttgaaggtaaggttcttactgatgaagaattagcagattactacgacaagcttttggacgaattcccagaattaatttctatggaagacccatacgacgaaaacgatgttgacggtatggttaagttcactaagagccacaaggaccgtatccaaatcgttcttgacgacttcatttgtactaaccctgcacttttgactaaggctatcaaggaaggtgctggtaacgcttcacttatcaagttgaaccaaatcggtactgttactgaaacccttgaaactatccgtctttcacgtaagaacggttacaacactatgatttctcaccgttcaggtgaaactggtgacaccttcatcgctgacttagctgttgctgttaacggtggtcaacttaagaccggtgctccagctcgttcagaacgtgttgaaaagtacaaccgcttacttgaaatcgaagaagaacttggcgaaggcgaacgtcttgcattcttcccagacgatgttgaccacgattaatttcgagttaaccgagtacaatttcaaaaaaagcatgagaattaattttctcatgcttttttgttgcgcttttacatatttattttatcaatttgctaaaagccttatttaaagtgcgatccttaactacttttaccataattggattttcgtttttagattgatcaagcaagataattggatttttatccttcaaacagaacaagtaagtattatgccacgatttaaaatcatcattagcaatggcaagcacattatagtcatattttgttttgccaattggactgtagccgatctcaattgtttttttatttagaataaatcgattagtagtcaatactttggggtaagttgcaccctttttagtctttaaactcttttttccatcatagaattgataagtttgccctgacttttcaccccagttattaactttcctttttagtttaacagttttagcggcatcccagattctagttgctttttctttatctttcctcttatctggcttagccttctgtttaggcttaacttgttttttgtctgaaaattgcttttttactggttttgttttctttttagcaactgttgttttcttagctttttttacttcaccaatagttactgcatctttaccgaaataaacttgactacaaccagttaaagtcgttgctaaggtaattgcagcgagtcctattaaaatttttctattcataattgctccatttattatttcttataatattattgcataaaatagtctcattaaactttaggcaaaaaaatagagctaattttccaattagctcgcggttttttaataaatggtgacttgataacgattggaacgatctgtttcttctggtttttcagcaatcttcccaactggcactataacactcgtttgaaaggcaggatcaatgcctaattctttttgcaattcaccggcatcatttaacctaactgcaccgcccatgacataaactgaacctaatcctaagtctgttgctgccagcataatattttctgctgcacaagatgcgtctcgttcaccaaacatgctatcttttttggtattaattacaaacaataccggtgcattgtagcaagcattatcagttttttctttgatcttattgcgtaatccttcatccttaaccacaactagattcatcacatctgtttgattcatcccacaaggtgcagtttgaaaagcgacaatcaagttcttaagatcatcatctgaaatactttctttactaaaatctctaactgctcttcgattagtaaaaattgaatttaccatatatgcctccgcatttactttacatacgcgtggtgctagttaaatcgttttagttaataaaaaagtccaattagactagactcaagttgtaagtaatttaaatagaaaagagtctgatctaattgaactatctcaagcttaatcgtttttctcaccatttacaagttagttttaatcggttaaatgtgatttgtcgctcgctgtataagctttatgcgcctgatggacttaaacatcgtaaaaatgttgatcagaccaagcttcctgatagttctatcttagcgatgctcatttggcaaactgaaattggaattgaatctcaacgaagattctgtaaattcttcgttggcttatctcattctcgttttaaccgtcgagctcgaatgctcttgcctctaattcgttgtatccgtcagggttggaatcaggaagtaaaggtaggtggagaattattgattatcgacagttttccgattccagtttgtcagcctgttcgcaattatcacgttaagatcttccgtggcatagccgatattggttataaagcgacgaaaaaaatctactattatggcttcaaagtccacgcaatagtgagtgatgatggctatctgcttgactacgcagttactaaggcgtcggtacatgatgcaaaagagacggtagaattgatgatcaatgctcatccaattaaccattatcttttaggagatgaaggctatttaggaaaagacttagcagccaagctaaagcgtatgggatacgtgctttggacaccatatcgtaaaaacatgaggggtgctaaaaagcataatgatcatcagttaatggcaattagaagaacaatcgaaagcgacttttctttgcttagctattacaatgctgagaataatcgagccaggagcttagtaggttttcaacaacggctagaaatagctattttagcttataatatggcatattgtctagaacgatttaactagcaccacgcgtattattgagaaaaaatatacaagaaaactacctgaacaatttgaactggcccaaaaatatcaaactagtcgggtcacaatcgttcacgccttaaagattttacaaaataaaaaattaatacggactgtcaagggacatgggacctttattacaagcaagtctattcccgacatttttcttaattctgatgtcaatgagcataccggctttactcgtcatgtcaataatgctctcgcaataaccagtaatgtgattgcctttaacattcgcaaacctagtattagtgaacgaaaagctctttgtttagaaaaagatgacgaagtttacgatattattagacaacgaattttaaataagaagccagctaaactagaatataccgtgatgcctgttagccgcatccccggtatcaccctagatattttgcacaagtcaatctactcttatattcaaaatgatcttgggcttaagatcggccgagcagatcgcattattacagctgaaaaatctgatgcatatgatatgaagtatcttgaatgtaaaaatgatgatcctgttttatgtattcagcaaaaggcattccttgaagacggacgaccttttgaaatttctgagtcacgtaatcgctatgaccgtggtgatttaacagttaatggcaaataagtgttacttgattaaaaaaatcaattatggcaaaatggctctcgtaagcgtttccaattacatacaagaaagtgaggaaaaatttaatgtattcagcaaaaatgcctaaaaactttttatggggtggtgcagttgctgcccaccaacttgaaggtgcttggaaagaaggaggaaaaggtacttctgttgctgatgtaatgaccgttggttcagctactaggccacgtgaaattactgacggtgttcttgaaggcaaaaattatcctaatcactcagccattgatttttatcatcactacaaagaagatattaaattaatggctgaaatgggcttcaaggcttttagaacttcaattgcctggacaagaatctttcctaatggtgatgaagccgaacctaacgaggagggtttaaagttctatgacgacttattcgatacttgtcatgaatacggcattgaacccgttattaccctctcccactttgaaatgccttttaatttagctaaaaactatggtggttttaccaaccgaaaagtaatcgatttcttcgttcgttttgcagaagtttgcttcaaacgctacaagaataaagttaagtactggatgacctttaacgaaattgataatcagtctgcattcaataatgatttcttgatggctactaactcaggcattttgttcaaagatggcatgactgacagagataaagaagccgccatgtatcaagcaggtcactatgaattggttgcttcagccttagctgttaagattggtcacaagattaatcctgatttccaaatcggttgtatgattaactactcacctgtacgtccgctcactccatcaagtgatgatgtccttttagctgataaatgggagcaacgccgtgactggttctcagatgtacatgtttttggtgaatatccaaatgcagttgaagcctacattgaacgaaatggctatcgtcctgatataactgatgaagataaaattgtcctaaaggaaggcaccgttgactacgttggcttctcctactatcagactactaccgtttctagcgaaaaagttaaacctgatgaattaactgatttggctaaagctgttgctaagaatccaaccttaaagcgtagcgattggggctgggaaattgacccagaaggcttaagaattgcattaaatcaattgcaagaccgttaccacaaaccattattcatcgttgaaaatggtcttggagcttacgataaagttgaaactgatgggtcaattcacgatgactacagaattgactacttaagaaaccatatttcagaaatggaaaaggcagttgaactcgatggagttaacttaatgggctacttaccatggggctgtattgaccttgtttctgcaggtactggtcaaatagataagcgctacggctttatctacgttgataaaaacgatgctggtgaaggtacattggctcgttcacgtaaggactcattcttctggtacaagaaagttatcgaatctaacggtcaagacttagattaattaaactattaatagcaaaaaactgatattcagactttaatcattgaatatcagttttttattttataaatatttactgccttctttaatactcatttagctaaatgctctcgatgcagttcaatgaagttacgcacccaatctggattggtcttagagtaatcacgcaaagcccagccaattgccttattgataaaaaactcctgactatcaagattattttcaataattttttgtaataacgcggtgttcatcttctttttacgcaataattgatgctcaatcgcgacccttcttacccagaaatctggatcgtgcgaccacttgagcattagatcgtctactcgattatccgttaagccaacatagccataaattttgattaatgagtcaatcgtatcccaccattgctttgttctaacaaaacgctcaattttagctaaatcatcaaaaacaatatactttttcattgccaataaataatcacaggcaaaatattgcaattcgcgttgttcttcatcccatgcctggtctagcaacttccagtcaacttcttttttcttcttttcatctttcaaaaaattatgataaatcgccctacgttctggtgtttgtaggccatagaatagaaattgatttcgcatgtaaccaacaagatgattggccttttcttcatttgctcgagcgctaaattctttttttaatgtttcaatattcatgttttttattttagcacaaaaagaggtcccaaattctagagacgcttatcgtaaaaataatcatctacccgatcatttcaactaaaagcttggtagaataaaagtatctatattaagaaaggcataaacaatgaaacaaatttattttaaccatgatggtaatatcgatgatttagtatcttatctgctcttactacaagcaccagatatcaaacttttaggtgttggtgcaattgatgcagacggctacattgatcctagtgttgaagcatgtcgcaaaatgaccgatctttttaacttacgtggtgatgatttgactattgctcgttccaactcacgtgcagtcaaccaatttcctcacgagtggcggatggcaacttattcatttaattatcttcccatgctcaatgaaagtggcaagattgatacgcagcaggcaaagcttcctgctcatttagacatggtcgaaaaaattaaagaagcagacgagcctatcgctttagttatgacaggtccgttaactgacctggctcgcgctttagatgtcgatcccgacattgagaaaaacattgaaaaactttattggatgggtggttctcttgatgggcacggcaacgttgctatggttaacgctgacggtagtcaagaatggaactcgttttgggatccatacgcagttaaacgcgtatttgaatcaaatattccaattcagatggtcggattagaaagtacggaagaattaccacttaacgatgagttgcgccagcactgggcaagtttacgcaaatatcctgcaatggacttgataggacaaggctatagtctaatcgtatctataccatcagccgaactctacctttgggatgtgctaactacaatcagcgcactatatccagaagttgttgaaaccgaaacggctaaagcaagagtcatcactgatgggttaagtgcaggaagctttgtacgggatcctaaaggaagagaagtaactcttgttactaaagccaataaggatctcttcttccaaaagatggatgaaattttagaaagaaaataacaaaaaaagaggctcacgcctcttttttatattgccttaattgactttttgtaaagaattaccgcaatccaaactgaaatgaatgatggcagtatcgcaactacaaacaaatttggatctaaaaaattacctactctgatgaagtttgtaattgaagtaatatgttttatgttactaaatatcgcttgataaactgtaacatatattaacgaccactgaatataatattctaccaaagtgagtgtagttgtcgaaaacttaaaaattttgctagccagtcgcatcccccaataaacaaaaacacctgaaagtacaacaaatgctgctaacagcaaaaacaagtttcccaaattaacatggtcccattgactcatgatcaaatacgcaattaccatgaaaattaagaaattaattgttgaacaacacagctgaatgacaaataaaattgcagcctttaagaattcaaacttgtgctctgatctgaataacaaaaatactactagaataattgcagcaacgatgaaatatgtattaacgtgcacagttatctcctactttgcctgttttaaggcttcgcttgtagcctctttaaccccattggaagtaaatgttgcaccagtaacagcgtcgatatcagcagattgtttatccaaaatttcctgctttaatgttttttctgctttttgaccatactgcggcgtttccgtagataaatctaaatctacagttgaaattttattatcagctacagttaatgtcacacctacaaagcctgccatgccgcgtgcacgggcactatatgttccttcttttaacatcctttttcctcttttttataaaacaaaacattctaagctaaatagtgaattagttatccgacgggataattgattcactatttttattcttttgtagaattaaagtagtagtaaaacgatatgccctgaggtctttagacacttgatgtcgcataataaactggcagttttacttaagttttcaatagtctcttcgaagaatgtggacactagatgtcgagtttagaaaattagatctgatttcttaagtaaatacgttttactactaagttttggaggtttttattatgcaagttacttttggaattgatgtaagcaagtctacttctactgtttgtgaactaattggtgaaagcaaaaatgaactaaccattactaataatcgtcctggttttattcaattgcttcatgaattaaccgctttttctaaacatccgcaaattatttttgaagctaccggtgtttattcacgtacactgcaatcttttctggaagactatggctatgattatgtaattcttaatcctcttaaagctaaaaaagaaatggatatgggactacgtcataataagactgataaaactgatgcttatcatttagccttaattcaaagactatatcatcatccaattaatcaacttcaatctcaaacttataagcagcttaatgctttgagccgcttctatgaccagttaacagctgacttagtaatggctaaaaatcgacttcaccaagctctacaatcgacttttcctgaaattgaaaatctattttcttctgctaaaggtaaaaattactggcaaatagttgtgcgatatcctcattgtgacttagtaagaagagaagataaaaaacagcttattaactggttaatgagcttaaaggggattgcttttaaacacgctctaaggactgcagataaattaattgaattagcttatcaagcttatccagttgtatcttgctctagcatagaagtcgagcaagtgcagtattatgcacacagattgcttaatttaagtgatcaaagagaaaatttaatcgcaagaatggttaagttagcgaagtctttgcctaatcatgatttagaaaacctagaaagcattccaggctttgcacagaccactgctgtcagagttttagcagagttaggagatttacgcagatttagtaatcctaataaaatcaatgcttttatcggaattgatccaggcagatatcagtcaggagaaatggactctaatttaagtattactaaacatggcaatgcagtcgcacgtaagttgctttatcgagctattggacaaattgataatgcagctaagacaaatccgtgtcatatagcagattattatgaaagcaaaaagctatcctctcaaaccaaagggttcaaaaagatagctattgcttcaattcataaactaatcagaaccatttatgctctgattatcaatgatcaactatatgattacaacgtagccacacataaccaaaaagactttagttgtaattaattgatcaagtacattataacgctaagcccataaattaaatatagaggtgggcttatttagtatgctttctaaaaaaataaatcgccactaaaagatactcatgacaaaatttaggtaaaaaataaagccaaacaccttattgcgcttgactttacgtagaaaaatactgctatataataaatataacagtattcctaaaaaaagccacaaagatattgtgtttagtatatcatattgatatactatctcttgggtcttgattgtttttataagcccttattatgacccaagtgcaggtagtagaatccccttctacctgttttattataccacaataaataactgatgttatataaaatcttaagttcttttgaaaattttctcaaaagggcttttttcttgcactatcctttctaagttacgttaaaattgaaatggaattataaagttatatttaaagaaggtaaagcatgtatccagataataatattcttacatatttaaaatggcgtggtgacgttgacttctcaacatcgccttttaatgatattgatgcacttgttttatctattttttcttatcttgaattaccaggtattgttaaaagtaacggaacgacaattagtttagagaaggctgccaagctctattttgcagatgatcatcctcgttatgataatttgcaataccaagaactatttaaattaatggctcatgcagaccgctttaaaaatgcaaaactgtcgtattttattagtaccttaactgaacatactcaatttagtgcaatcaaaattgaactaactgatgggaccaactttattgcttttcgtgggactgacgattcactaattggctggaaagaagattttgaaattagttttaaaatcactgtagcccaacaacaagcagtaaaattgctcgaaactattctcaaagctgatgatcaagattattacttaggcggtcactcaaaaggtggcaatttagctgaatatgctgccattaatattgagcccaaattaagaaaaagaatcaaacgtatttatacctttgattcacctggaattgcagaagaagttggtgctcagctccctaataagtatttgcaaaatactctacgccgctttgtgccagactttagcgtcatcggtcgcttgtttgagtcgaaaaatattccagccactattgttggtagtactcgcaagggactaagccaacacgatgctttttcctggcaaataatcggttctaacttcgacaccagacgccaccgcaatgctcaatctcaagtatataatcaactaatcaatcaatggattggtaacgccaccctagaagaacgtgagtctttaactaatgacctcttctctgctttaagctctagcggcgcaactaagatcaacgaacttgataaaaatggttttggcggttttggtgcaattttgttttcactggctgattcatctcggcgaacccgtttcgtctttggttcattattttccagcatttggcagacgatcaagagccagcaactgaccaaagcgcttttctcaacagacacaattgttggttgggtgctggtagtattcggaatcattagtctaactctaccccaatatgcagtgcgagcttttggcgccctagttgccttcacggggattggtttcagtgttcaccaaattttaacaacggcaaaatctagtctaaaagaccgacaaaaaaacttctttattatttcgtatttagtagtttttgctttatcaaccgcgttaatttctaataaccgtctactaattttcttagctcactacttcttaggactattcttaattatctattcctacattcgaattaggcaactagtctttcgtaaattacccggaatttttcagattactattgtagcgatcgaggcattaattgcttttgctttaggaattatcgtagtggttaaccctagtgcctttaatcggagagcaattattattatcggtattttgctaattgcttacggcttcttcaagttagttggcgaattatttggccagcgcagcaaaatgcccaaaaatcatcgttaaaaaaagcttgttaacttcaatatcagttaacaagcttttttcttagcccttaataaaggtattagcctttatatgctttaaaatgttatacccgattgcacgaatatgatttttactaccataagtttgattcaaaaacattacaattccattctgattatcagtagtcagttgcatccagttaacaaagtgggtatcaccaaaattgccataagcgacttttaaagtttgattctttttcagataaaaaccacctgagtaagtattaaccttagaacttaaatgaccaagataatggaactgttttttagtcagaatcttgccattttgcataccagattggattttataataatcattagccgttgaaaatagattcccagcaccaggcaattgagaaacaacattacgattagcataggtactagcattgtaatttttaccaccagaataaagatatgaaatcgcatcagtctttgaccgcggaatttgttgataaatataggtttgcttcaacttcaatgatcgaataacccgctgtttcacattagcagcataagactttcccgttactttactgataatgcctgccagcaaaacatagttagcattattgtaattaaatttactgcgtcccgtattttctcgtgcattggcttgggcaattgtccaattgatcgcgccattttcagaaaaattaactccatgattagattctgttccaattacgttaattcctgaggtatgtgtcattaactgccccaccgtaatttggtttgcatgcttcaaatttggataccagcgtgaaatcttagtattctgattgaatttcttctggtagattaactgtgtaattattgcagcagtaaccatcttttgcaaagaaccaactggataaagcaattttgtattgccatttttcagtcgtttgctgtaataaccgtagcctaagctaacacgttgagcatgcccattttttacaatttcaatgcttcctcgtaaatgatgctttttcatcatcttaagcgtatattgccgtagttgcttatttgaataactcttcgcctgcacagcatgatttgacattatcaaacacgatgaacaaaataaaatgaaagctatcccgaacttttttagtgtcttcaaaatttcaatctccttttaatcctgaactattctaccacaatcaaaaagcgcaaaatcacttttaatcatggtttgcgctttcatttttatttttttaaatttttatagtaagttcatcttaactaggtattccgcattttcaaccgtattccatgcagcacccttaagcaaattatcggctacaatccacatgttgaaggcacccttattttcataatcagggcgaatgcggccaacaaaagtttctcgcttacctgttgcattaattggttgcggataaatttgatgtttaatatcatcttccaaaacattacctggaaaggcagcaactgcatctttaatatcttgtgccgttgcagtctcatcttcaacagtaaagtagacactttccccatgagaaattgacacaggaaccctaacacaagttgcagttaccttgatatctttggcattcatgtcatttagcatgatcttctttgtttcatgaatcatcttccattcttcatgagaatagccactatcttctaaaacatcaatttgaggtaacaaattaaaggctaatgggtaatgctttttgtctcctttagtaggtaaaatatgagcatctgcttgcatgtctttaccatcaaggtaatcttgactttccttttttaattcatcaattgctgcttgccctgctcctgaagcagcttgataagtggaaacgataatttgtttcaaaccaaattttcttcgaactggttccaaagccattaccatttgaattgttgaacaatttggattggcaatgatgccgtgatgctttttcaatgcttctggattaacttcaggtacaaccagtggtacatctggttccattctaaatgctgatgtattatcaacacagacagcaccacgcttaacggcttccggcagaaacttctttgacactgcaccaccagctgaggaaagtactaaatctacaccatcaaatgatcctggtgtagtttcttcaactgtcaaatcttgatccttaaattttaaaactgtacctgctgaacgtgaggatgcgagtagctttaagcttttaactggaatcgttgattgttccaattgttcgatcattcttcttcccacggcaccagtagcacctagaattgcaacattatattctttcaccattatttttttcctcgcaaaaaattcttcattctttccatcgcttcatgtagattttcatcactggaagcatatgacattctaacgtacccttctccaccaggaccaaaagcactacctggagtaataccgacttttgcttcaaatgctaaatccagtgcaaattgcatatcatttttaccatatttagctggaatcttagcgaaaatataaaatgctccctgtggtttaactgcttgcatccccatcttagctaattcatccaacacaaaatcgcgccttctttgatatattttgcggtatttttctggatcatccaatccatgctccaaagcttcagtcgctgcagcttgagaagagtcagttgtagtcgtaaccattaaaccatggactttaccaatttgttccataatttttgccggaccagctacataacccagtcggtatcctgtcattgcatgtgacttagataatccagaaatataaattgcccgttcaggaatcacacttgcaattgaaaaatgcttaacgccataagttaaagtactgtaaatttcatcagtaattacgtacagattgtgtgcttttatcacttcagctaatgccctaatttcgctttcggtgtattcaactcctgtcggattaactgggtagtttaagataaccgccttgatattagattcttccttaagtgtactttctaatctttctggcgttaatttaaagttatcttctgacgtgttcattaatacataatctgcatctgctaaagttgcaactggccaatatagtgaaaataccggtgtaggaatagcaaccttatcaccccgattggtaattgaaaatagtgtcgcattaattgcttcagttgcgccaactgtaaccacaatttcagtttctggatcgtaaactactccacttgcttttttcaaataattgctaattgcttgcctaagttccaattttcccttttgtggcgcatagtgtgaatcattatttcgaatactttcaattgcagctgttttaacatgctcaggtgtattcatatcaggctcacccaaagtcagcttgataattccaggaatggttgaaactttattatcaaaaatcctaatccccgaagccttaacagattgaatcttcttacttaaagctaagtcatttgctaattctggcataatttttcctcttataaaatattctctaagccaataactagttcagttaattgatctactttttctaaagcaactttaaccccactcataaaggaatcacgatcaaatgaatcctgtctaatggttaaagcttcgccaggtccaccaaataaaacttgctcatgtgcaatatagccaggtaagcgtactgaatggattttaattccttgataatctccaccgcgaacattggctaaagtctcagtttcatcaggcgcagtttgatgttcaggacgattttgcgcgatcatttttgcagtagctaaagcagtgcctgaaggtgcatcttttttatctgcatgatgcatttcaataatttcaacatcagggaaatacttagcagcttcttcagcaaacttcattaataaaactgccgacattccaaaattaggtgcgattaagccacctaatttttcctttttggctagttcaatcaaagttgcttcttgatcatcactcaagccagtagttcccacaataggtttaatttgatgcgttaaagcaaaataaacattgtcatagacagctgcgggagtagtaaaatcaatccaaatatctgcagcatggtcaggaatttgacttaattggttaaaaatttgggctgttttaggtaaatgatatctttcaggctcatttactgcctttggagcaaatccagccaccaattcaaaattgggcagctgattaactaaactaacagccttttgccccattgcgccagtaaacccagctattagtacttttttaggcatctcgtcttaccaatcctttcctaaattaagtggcaacttttgcatcaatgcattagcatttaaacctaaatgctgggccaacttttctttttcctcatcacctaaagcgactaatggcaaacgacatccccctactataaatccttgagcattcaaggctgccttaacaggagctggtgaaggatacataaacaaagcctgcattttcggcgttaaccagcgttgaatcgtgcccgcttcaggataatttccttcataaagatcatcaaacattcgccgcatttgtttgcaatataaatggctagctacggaaataacgccattggctcctagtaatcttgcaggtaacgcttgcgtatcttcaccactaaataccaaaaaattaggatctttatgatcaataatgtattccatttcttctaaagatgcacattgtttgattcccttaatatttttaaggcgtgataattggactaccgtttctttttccatttttacgccagttctaccgggaatgttataaatcataattggcattttagtctgagcattaacagcactaaaatgtgcaatcatgctacgctgatcaggcttattgtacggtggcactactactaaggcataatcaattcctttaatctgtgctacctcattggtgaaggcgatagtggttgcagtgtcgttactgcccgttcctgcaataaccggaacacgtccattaacaatttgaccaaaatgctggtacaagtctatcttttcatcatgagtcagagttggcgtttctccggtcgtaccaccaactacaaagccattgcaaccttggtcaattaaataattaaccagcttttctaaactggcaaaatctattttttgattctcatcaaatggcgtaacaatcgccgttaacaaatctgcatcaattaatgttgccattttattgcctcattctattaatcaaaaatcctttgattgcatcaacgccgcgctgaatgcttttctcatcaggattaagtgtagccgtatgcaattgtgaatcaggattaccaacacctagccaaaacattgttccagggaatttagtcagcaaaaagccaaaatcttcacccgtcatttttggttcagtagtaataaagttaaccgtcggctggcttttcatatatgaaataaagttcttggttaattgtgggttattttctactggccaatatccaccttgattcaagtctaacttcacttctacaccaaagcttttctcaataccaagacagatttctttgagacgttgatcgattgtcaaaatcatattttgagttaagccacgaatcgtgccctcaattctagcttgaccagcaattacatttctaatcgtaccagcttcgattttgcctagagtaataacaccactttgaattggatctatgcttcgtgaaataatagtttgaacctgcatgatcaaacttgctgctgcaactaccgtatcatttgcatcttgcggaaaagctgcgtgtccacttttacctagaatatcaatattgacttcagttgtaccagcaaaaagtgtacccatccgacacccaatgctaccagcaggcaaagcggggttatcatgcaagccatagaactcgtcaggtttaaattgatcatgaaaaattcttttttcataagcttgcatcccaccactttggctttcctcggctggctgaaagaaaaaaagcaaattatcttgtggctgattttcactaaaatagcttaacaaacctaatgccacggtcatatgaatatcatgtccacatgcatgcattactccctcatgttttgatgaaaatgccagtccagttttttcagtaactggtaaagcatcgatatcagcacgatatcctatcgttctgtgtggttttcttcctttaactaatactagaattgcggtaggcagtgtcgacggtatctcaacttccaaataatcttgcttaaatttttgaattacctcgattaaataatcatgtgtttctttttctgctagtgctaattcaggtatttgatgtaaatgccttctaatttgaattaactcactttcacttaaaactgacattttataactttctcagattatcttctagttccgtcttactactagttttttcatcaacttttttaataattttagcaggaacgcccgctaccatcgtatgtgctggcacatcatgagtaactactgctccggctgcaataacggctccttcacctacatgaacaccctcaatcacaacagcattagccccaatcatgacattatcatcaatttgaaccggtttagctgaagcaggctcaattacaccagccaatacgctaccagctccaatatgacaatgttgtccaacaatggcacggccaccgagaactacgcccatatcaatcatggtattagccccgatttctgctccaatattaataatggcacccatcataattactgcattattaccgattaccacttgatcacgaataatagctcctggttcaattcgagcattaacttttttgaagtccaataaaggaactgctgaatttcgtgcatcattttcaatatggtaggccgtaatttgatgattttcttttaaaaatggttcaatatctttccagtcaccaaagatcgcgccagaatgagcttcagtaaaattctcaatttcctttggaaaatcaatttgtgctaaatctcctttaataaagacttttaccggtgtcttttttggtgcattaccaatgtaatcaataatactttttgcatctaactttgccatcttttttctcttttctaatttaaatatgattgatctaaatgaaccaagtcttctaaactttcacgcttaatgactaattttgctttaccattttctgcaaataccactgctggtcgaggattacgattataatttgaagccattgaatacccatatgcacctgtatccaacatcgctaacaagtctccagctttgacttgtggcaaagcttgatcttctgctaatatatcgccactctcgcaatacttaccagcaatacgaacatgttcagtcaaaggcgcttgtggatcggtggctaaaactgtttcatacttagcctgataaagtgcagggcgaatattatctcccatcccgccatcgacagtaatataagaacgataacctggaatatccttacggctacccaccgtataaaggttgtaaccggctggaccaacaattgatcttcccggttcaatatcgatttcaggtaaaggataattcattttttcagcttcagttttgatcaccttaacaatcgtcttaacaaattcttctggtcgtaatggatgatcttcttgggtatatttaatcccaaaaccgccaccaacattaataacttgtgcaagatagccatacttttctcgccaatcttgcgctactaccattaatttttgtgctcccatttcaaagccgtttaaggcaaaaatctgtgagccaatgtgagcatgaatccccaacattttcatcctaggattagctagaacttgttttaatgccttttctgcttgacctgattcaagatcaaagccaaatttactatcaatctgacctgtttgatcatattcatgggtatgtgctgaaatccctggtgcaatacgcaacatgacactaatcgtagcatcgtacttttttaaaacttgcgccaataactgaatctcatgaaaattatcaataataattttgccaacatgattttttacagccatttccaattcagttaatgatttattattaccatgaaagctaactctctccattggaaaattggcttttattgcagtaaataactcacctgctgaaactacgtcagtgtatgctccctcttctgcaataacttgatacattgcgattgctgcgaaagctttacttgcataactaacagcataggccatgttttcttcttcaaaaactttcttaaaagcccgaatttgtcgacgaatttgatcgacatcataaactactaatggcgtaccatacttttgagctaattctactatatcaactccaccaatcgttaaatggccttgctcattaatctgatctactgcaatttgtgaattcattttgttctcctgtctttttcaggcgaaacgctaataaaaaatccattgtctgcgccaaacaaacaatggattaatttctacttaatctatggtcgatagcgctccgcgaattttgttcgcgacagtccgcagtttattcaactacgccccagctcaagcctttagcatgactcagcttcggcaacctccccttttacaattcatcttcgttttgcccaactcagaattgttacttatgtcggctgcgcctcttcgattgactgtagtttacaattttataaaaacatagtcaacaaatttattataaaaatttaattttatttgtaacaatgcggcatttagagtgataaattacagtcatcacttgcaagattaaaaaataatgttagaattcaattaaatttagtctgacttttttatttaaattaatgatttctgaaaacaaaaggagttttgaaatgaaaatcgtaaagtttggtggctcttctttagctaccggtgaaagtgttgcacaagcaattcaaattattctcagcgatcctcaacgacaagtaatggttgtctctgccccaggcaaaaggaatacaacagatatcaaagttactgatctgttaatcaagtacgcagatttagccttaaagcacaagaattgtgttgaaatcgtgaataaaatttttagtcgctatcaagaaattggtcattattttggcttagctgatacggaattaagtattattaaacaaattttattagagttgcccaatcagggttatcctaacgaaaaatatcttttagctgcatttaaggcacatggtgaacggcttaatgctcgtttaattactttaattttacgccatcaaggaattaatagtcgttttcttgatccggctgaagccggtttaatcgtgactggcgagcccaatgatgccattgtcaatccagagagctacttaaatcttgaccaaattaaaattaaggctgatgaacgtatcgtatttcctggcttttttggcatgactccgtctggtaatatcgccactttttcccgtggcgggtcagacattaccggggctattctagctcgcggctttcatgctgatctctatgaaaattttacagatgtcaatgggatttttgccgctaatcctcatattattgagcatccccaatccatcaagaaaatgacttatcgcgaaatgcgagagttgtcatatgctggcttttctgtttttcacgatgaagcattgattcctgctattcaaggacagattcctatcaatgtgaaaaatactcatgatcctagcaatcctggcactatgattgtcccagaaaaggattttgtcccagataatgcaataaccggcgtaaccagccaaaaacatttttccgcattatatttgcataaatatttgctcaataaagaagctggtttcaccttacgtatattacaaattttataccaacataatattccatatgagcatatgccatctgggattgacgatattaccattatttttaacaatgattttctaaacgatcagttaattgatcaaatttgtaatgaaattcaagctacaattaatccagatcaactcgaatggattgaagattatgcaattattatggttgtcggcgaaggaatgcgacaaaaacataccatcagccgtcaaattatcgattctttaggcgatcatgatatttcaccacaaatgatcaatcagggagcttctcaaatttcaatcatgatcggtactaaaaaagaaaaggctgatgaagcagtaaaaattatttatcaaaagttttttaattagggggcattatgattaatttattcaaagttcacggttcgcaaaatcatttctttattcttgatcaaacacaattcgaacacgaattaagtgacgccgagctaaaaaattttacgcaaaagattaccaatccacaaactggactgcttcacggagcagatggcgttttagtagttaatcatcccgtgcattctaactcacttggccagatgcgtgtaatcaatgctgatggaagtgaagcatcaatgtgtggcaacggtctacgcaccgttgctcgttacctaagtgaaaaaacgggaaaagataatttcctagttgacacaatgaatgccagcttacgtgttagaagagaaaaagattttgcttctaacgtgccagcatttgcagttgagatctctcctgtacgctttaataaagaggcactcccttttgataatttaggacaagaacggattattgatgcttggttgccagaaatttatcctggattacgttttacttcaattgccgtacctaacccacatttaatttcttttgttaatcaagcagaaattaccggcccgatcttaggcattgttggtaaaaaattaaatagcaataatccctactttacagatggcgtcaatgttaatttcgcgcaaattttagataaaaataaactttttgtccgcacttacgaacggggcgttggttttaccaatgcctgtggtactggaatgtccgcgacttctcttgctcttactttaacccaccccgaaataggcaacttaaatacaccaatatcagtttataatcctggcggtatggttaaaactatcgtgcattatgaaaaaaatagttattggatcgagcttattggtaacgctacttttactcatcgaattaagctttctgaagctgacttaaggaaaggtgatttttccaatgtccagatccaaaagactgctgaacaaagtgcttatgaaaaatttattgctaatctgccaaagttcaatgacattacaactttagcgtaaaaaaatggcttgcaacacgcaagccatttttactttttaattattaatctaagtctttcaagccatgctttttcttggaaacgcgataagctactaaaccaaagaaaattggaccaaagcttgtccaaaaagcagttgcatatctatgctccaaaactggttgcaaaaccgtaaatataattccggtgcaaacaatcagctcaacaaagactactaacgcaaccgtccatttatagttagtaaacactctaaacttgcgcggataatcttttttaagaaagaatggaaatgcaccgatcaagaaaatataaggtgcagtagcggctacgttacccatatccgtcagaatttgataaaagctagtcgctgcgctaccaccgaatgagaccaccgcaattaataggcaaacgaagacagtttgagcccacatcgcattagcaggaataccgtgtttatttaatttagtcgctgccttaggccataaacgtggatcagatcccatgatgaaggatttaattggtgaataaagcaaaacaaagagagcacctgtcattcccatcaaaccagataaagcaattgctctagtaaagaatttaccaatcaataaactcgtgttaggatccaaatgaagtgcggttccaaaggctttgccaagtgtgccatatacggtatacgtaatatttccagtattggcattggctgctaaaatatctttttgataattaactgaaaagccggtcataaaaatcatcaaaacataagaaataatagtgaacaatgacccaataattaagcctttagggaaatctttttctgggtgtttcatactgtcaatcacaccaccgacggtttccatcccaccatatgcaaagactgcataaactacgaaagaaataatcgtaattggcgtttgaaaacttttattaggcgaaataataaaactttgccacccagtaatcggctgagccaattgcccatgattcataatcaagaccgttaaactagctagaataaagactgcattcattacaatcatgaaccaaccaccgattgatgacataattttaattccagttatccctctggaagacaggtacgttgatacaatcatgaataaaattgctagtacacctatcaattgagtaccatgcaagcccaaaatattccattcttgagttgtatctttgccaaaaataagggcagagattgaaatccaaagccttgaggcgcttgcaaccagccacagcacccagttagccagccatacaaaagtcccaataaaggcctatttttgtccaactgagccagctaaccatgaataaataccaccttgagcatcatgaaaagcagacccatattctgccatcattaagccagctgggaaaaagaaacagacgccagccaaaataaaccaaatgatcccagcatatgtcatttgctcataagaaacagaaacattgccaaaaccataaaccgttgtgataatcatcaacacaaggctcatagtcgtcaatgattttttagtttgtgaattttcatcatccaagataaagcctctactttctatttacactttccattttagcatcgtttatcttgaataaatttattctaattttaggctcataagaaaaaactactagttattcactagtagcccttcatttttattcattaattcttttttcaatccaattacttaattcagttacatgtaatttagtgaccgaactaaaagtcaaaacggtgacatgatcatagttgagattcaactttttctttaagcctgacatcaccttattagtttgactcttttttattttatccatcttggtacaaactaccaaaattgggatatttagatattgagcataatcatacatagcaatatcatctttggttggttcatgacgactatctactaagataattagtccctttaggttgggtctagtttctaaataatcttgaatcatttcgccaaattcttgccgcttcttctgtgaaactttggcatagccataacctggtacatcaaccaaataaaatttttcattgactttgtagaaattcaaagtttgtgtctttccaggctgtgacgaggtcctagctaagtttttacgctttaatagggtatttatcaagctggactttcccacgtttgagcggcctgctaatgcgatctcaggcaagttatctttaggatattgatcttctctaacagcactaactgcataactactgctttcaatgatcattgacacttacctgttctttattatcagtatttttgcggattacctttggcttagcgtgcttagtaattacgtccttagttacttcaacggtctcaatatcctcttcactaggagtttcatacataatatccataattgaattttcgataattgttctaagtccacgtgcacccatatttctttggattgctaagtcagcaattgccttcagagcaccatcagtaaacttcaaattaacatcatcaagtgataacaacttcttatactgcttaactaaagcattctttggttcagttagcactctgaccaaatccttactactcaatttatcaagcgtagtaataattggaattctaccaatgaattcaggaatcattccaaatttaactaagtcagctgtagtcaaatggcgtgtccaatcatctgcattaattttatctgcctcattttcagcaccaaagccaatggtctttttacctaaacgatttttaacgatttgttcaattccgtcgaatgccccaccaacaataaatagaatgttagtcgtgtccatcttaatcatttcttgttgagggtgtttacgcccaccttgaggtggaacagaggcaattgtaccttccaagatctttaataatgattgctgtacaccttcacctgaaacatcacgcgtaattgagacattctcagattttttagaaattttatcaatttcatcaatataaataatgccacgctgtgcacgttccaaatcataatcagcattttgtagtaacttaagcaaaatattttcaacgtcttcaccaacataccctgcttcagtcaaggtagttgcatcggcaattgcaaatgggacatttaaaatacgagccaaagtctgagcaagatatgtcttacctgatccagttggtccgatcattgcaatatttgatttttgtaattcagttgaagaatcaacatccatttggctaattctcttatagtgattatatacagcaactgataagacttttttagcacggtcttgaccaataacatattgatcaagttccttttttatttcaacaggcttaggtaattcacgagctgctttaagtgaatctgctcgtaattcatcgtcaataatttttttagccaagtcaacacattcattacaaatatatacaccgttaccggcaatcattttcttaacttggtcttgagttttgccacaaaaagcgcatttaatctcttcttgatctgtaaactgatttgccattatttttcctcctatatctaccaaaaatcagattatcataaattaactaatattgataaatattaagctcgaacagcaaaaaaagcggcctatagccgctctttttgagaaattagcaaatattactattacttgctttccttcttgtcatcgtcttctttgttttcaagctttgacttagcaacttgcttagcattatcagtaataagatccatagccttacgtacagtaatgtcgtggcctaacatgtcatctgataaggtgttacgtaccatcttttcatccatgttgtattctgaagcaagatccttgatttctttatcaatttcttccttagttgccttaaggtcttcagcagcaacaatagcttcaagaactaagttagttttaactctttcagctgcattcttttcaaattgtgaacgcaattgttgttcgttggtattagtcaacttgtagtaagtttgtgggtcaataccttgacgttgcatattacccaagtattggttcaattgagtatcaacatcttcttgaatcatagcatcaggaatttcatcgatagtagcgttgcttacagcaccttcaattgcagcttcttgaatagcgtcgtttgcttgttgttccttttgttccttcaagtccttcttgatcttttcctttaagtcatcaagggtgtctacagagtcatcaacgtccttagcaaattcatcgtctaacttaggaagttgctttgacttaacttcgtgaatcttagttgcaaagtgtgcttctttaccagctaaatcctttgcaccgtaatcttcagggaaagttacaactacatcaacatcatcgccggcttcatggccttcaagttgatcttcaaagccaggaataaatgcacctgaacctaattcaagtgagtagttttcagctgagccgccttcgaatggcttgtcgtcgatagtacccttgtaatcgatagtaacagtatcgcccttttcagccttacccttcttaagaacaagttctgcattttgttcacggcgcttgtcaagttcagcatcaatgtccttttggtaaacacgagtgttttgcttaagaacttcgatacccttgtagtcacctaacttaacttctggttctacagtaacagtagccttcatagtccaatccttgtccttatccattgatacaggaacaatttgtggttggccaactgctttaatacctgcttctttaacagcagcagaatatgcatttggtaatacaatatttaaggcatcttcatataatgcttcttcaccgtaatattgatcaaagatcacacgtgatacgtgaccctttctaaagccaggaacacgcaagtttttctttactcttctaaaagcttggtctaaacctaatttaatttcatcttgtgaaatatcaaaagtaagatcaccggttgtcttaccggtcttttcccatttaacagacattaattaaatacctccaatgtcaaatttgagtttgcatcttgcatactaagttatcttaccttaaaaggccgcaaaaaacaaatttaaaagaaaaaagatgcgctcctgtgaagaagtgcatctttttttaactatatcgttagaaattagtcaaggatttcagtaacctgaccggcaccaacggtacgaccaccttcacggatggtgaacttagtacccttttcgatggcagctggcttgattaacttaacagtaaattcagtgttatcaccaggcataaccatttcagtaccttctggcaattcaatttcaccagtaatatcagtggtgtggaagtagaattgtggacggtagtctgagaagaatggggtgtgacggccgccttcttccttcttcaagatataaacttgacccttgaattccttgtgggtttgaattgagcctggagcagccaatacttgaccacgaacaacttggtcacggtcaataccacgaagcaatacaccaacgttatcgccggcttcacctaagtcaagagtcttgtggaacatttccaaaccagtaacaactgacttaagaaccttgtctaccaaaccaacgatttcaacttcgtcaccgaccttaacagtaccacggtcaatacgacctgaagcaacagtaccacgaccagtgatagtaaatacgtcttcaactggcattaagaatggcttgtcagtttgacgttctggagttgggatgtattcgtcaacgatgtccatcaacttaagaatttgttcttgagcttccttgtcgccttgtaaagccttcaaagctgaaccacgaacaactggaatatcgtcaccagggtaatcgtattcagtcaacaagtcacgaacttccatttcaactaagtcgatcaattctgggtcgtcaactaaatcacacttgtttaagaaaacaacgatgtagttaacaccaacttgacgagcaagcaaaatgtgttcacgagtttgtggcataggaccatcagttgcagcaacaactaagatagcaccatccatttgtgcagcaccggtaatcatgttcttgatgtagtcggcgtggcctggagcgtccatgtgagcgtagtgacgattttcagtttcgtattctacgtgggcggtattaatagtaataccacgttccttttcttctggtgcagcatcgatttgtgagtaatcttcagccttagccaaacccttgtcagccaaaacagtagtaatagccgcagttaaagtggtcttaccgtggtcaacgtgaccgatagtaccaatgtttacgtgtggcttagttctaacgtaatgttctttttctgccattaaaatgaccctcctgtaaatttgcaagaagtccgttgagataagttaacggataattctctgttgaatattgtactactttcttcggcaaatgcctagtaaaaaagcttaagcgaaattgcctaacgaaaatatcctttgctaattatactaaatagtttgaaaatgtaaaccttttttacttattttttattgcggtaagtatttatatattttttctagtaatttttgatgactacggccatcttttctttgtaaaaatgagactaaatcactagcaaaactgtcaggctcatcaatatattggttaattttagggtaaagactgcctaataccaaattcacttctcccagcattaatggcaactgacttggactattgtgaaatttgcttccaatgctagaaataatttcacggtacttaggttctttttctagaagcagtgtattcgccggaataaagctctccatctggcctattacccaaatttcaaacttttcttcaagtcccaagcgaactaagtcttcacaaagtgacaacctaacagcaaaatctggcgttggatctaataagacgcttcgtgcaaaagctttaaaattaggcaggtttaacttatgtaaactttcataatccgactgagtaacctgttctcgttgtttaaagttttgcataatctgccgctgtttttcttcagaagctggttttaccttttctgataagtccaccccaacaagattttttagttgtagagcttcaataaaaaaattatttttagctagaatttgacagtaacttttaaatactcgctgatcagaaaaaagatcaggctcctctttaattaaagcatatgcctgatcttcttgtttattagcgcaatagagtttgcagagtttcaaaataacgtccaatgaatgctcttcacgtaatgcttcttctagattttgaatagctgcttcgagatctcccttacgctcatcttcttcagcaagtttcaataaattttgttggcttactgatgtcatttttagtctttcttattactttcttttttcttatttatttttttattttcgtctttggcatggttcttattgtcattttgtgctttttcattgcgtttctgcatagcacgatgacggttttgatttacttccatgaccacgggcaagatcactggacgacggttagttttcttgtataaaaacttctccaaatcaccgcggatatcttgcttcaattcagtccaatcaaactttttgtgttcaaaattggcctgaattgcttttttaattacatcaattgaatcactcatcaactggcgattagccttgatatagacgaaaccacgactagtgacttttggctctgcaataatctttttcttcttacggtcaattgtaacaaccgcaataaagattccgtcatctgataggacctcacgatcacgtagcacaatattaccaacatcaccaacaccagaaccgtcgatcatggtatcttcacctggtactgggtcagttaagaagaaacgcttctgcttaaagtcatattcaagacagtcaccattcttggtaatataaatatctttaggattcattccagctttaatagccaaatcacgtactacttcaagtaaacgatattcaccaattactggaattaagaattttggcttcaaggttgtaatcaaaagttgcagatcacgaccagttgcatgcccactagtatgtatatttctgcctaactggataaccgtaccgccagccttatataccaaatcactggtttcagctaccatcgtttcaaccgcatgtgacggagtagttgcaataaagaccaaatcgcccttatgaatcgtaatcatactatgacgcttcttagccattttttgtaatgagttaagtggttcacccatacgcccagtctctaatataactgtctgctcatctggcacagtcttcagatccttaactcgcatcaacaagccttcaggcacatctaaatagcctaatttcattgaagttctaacaatcttagctagatcgcggccagttaataagacgcgtttccctgttgctgctgcagcatttaaaacttcttgaacacgattcaagttagaggctttagcagctacgataattctgcctttagcatttctgaagacattagtcacaaatttaccaatatcttgttcagatgcattagggaaagatgcttctgcattagatgaatcacttaaaagcgctaaaacgcccttttgttcaatttcagctaagcgatccatatcagtccgataatttaacgcagctgttggatcaaatttaaagtcaccagtataaacaatttcacctgctggtgtatgtacatctattccaagtgaatcaggaattgagtgtgtcgtatggaagaatgaaatacttgcattcttaaaatcaatttcagtatctgcatcgattacgtggaacaaactattcttacggcgtttgttttcgcgttgtacttcaattttagcaagttcgatactcaattgtgaaccaaatactggaatatcgtatttacgcaaaatgtatggcaatgcaccaattgaatcagcatgcccatgtgttaaaaagatacctgctactcgatctccgtattgttcaaagaaatcaaggtcaggaattactacatcgataccaaataaagaactatcagggtactttaatccggcatcaagaacaaaaatttcatcattaacttgaacggcaaacatgtctttaccttgttcacgcacaccgctcaagatcataattttgatttgatcagccattatatttccttttctatctaatttttaattcttatggatctatcgatctcaacgtaaaaataatctgtttcaattttagcataaagaataaaattatgacagagacaaaaaaagccagccttttcggctagcttcattattcaatattatgtgaaaattaacgacgaagacctaacttcttgatcaattcacggtaacggttaatgtcgttgttttcaaggtaacgaagcaagttacgacggtgaccgatcttcttaagcaaaccaacgtatgagtggtggtcatgcttgtgactcttcatgtgatcagtcaagttgttgatatcagcagtcaaaagagcaacttgaacttcaacagaaccagtgtcaccttcgtgagttgcgtattccttcataatcttttctttttcagtctttgaaattgccatagttaaattcacctttcattaaataattgccgttaacaacgtttatcgtcggcgtgaacaaataaacagcgttagcggttcacaacagtcataatcatacacattattttttaaaaaagcaagcagaaattaccttgcatccgtgatatttcttaagtataatggatgaagtaaatttctaaatcattggaggtgaatttcatgccacaaatcaaatcagctatcaaacgtgttaaggctcaaaatgctactaacgaacgccgcgcttctgaattaagcaagttaagaactgctatcaagaagtttaagaacgctgttgaaagtgatagtaaggaagacgtctccaagttgcatttagaagctgaacgtgctttggataaggctgcttcaaaaggcttaatccacaagaacaaggctgctcgtgacaagagtcgtttaaacaagttagcaaacaagtaaatcttacttattactaataataaaaagaggagatctgcagtgatctcctctttttgtatactcttagacatttaagataaataatttcaaaaaattatcttctcggtaagttccatttttatatttaaattctaagtcgattgcatcccttaataaattttctagcttgtctatcttcaaccgattacgtagggctaacttaaccctatagggatgaacgcctaattcttttacaatttgtggttcgctacgacctctttgtgctaagatcttaacgaccaaaatcaattctaattgattttcaaagaccgctaataattgaattggattagtcccttcacgtaattgattatctaagcgctcaactgcttcacggtaattcttatctaaagccgactccaaaatagcgaaaatattttgtgctagggacaaatctacattttgcattactgatttttcagtaattttgttatcggtagctaccatttttagcttttgataattgcttaaaatagtgtcaattacctgatcactccgctcaattagcagctgtaaagctgactgtgtgattatatatccctcatctttgatcaaggctttagtcgttgaagcaacttcatagggcctaatttgtggctcaaccacattgaattgctttagaacagttttagtcagttttttacgcctatcaattttttcataagaagcaacaattactactacatcttctaaatcagctaagttttcaaaaatcttttgtaagtcatcaatttgtttctgtaattttttagataccttagctgttaaaaagaaaggatttttgactacaataaatttctgttcactaaataaactggattcagttaagctcgcaatcaattcatctaagccatcgctttcgcaatcgacagtcacgtgctccaaatctttaaagcgatcttccttggcatatgatctcaccaagtaatcattgagaaagtcatctgcaccccaaattaaggtatgtggattattgttatttgtatttttaaacaaagaaagtaaggtcattttttatcccgctttaaaaagtaactaaatctaggactttgcagtccgccataataccagctaatcataccacagtcttgcgttgaaacccatggtatttgctgttgagttagtgtcgttagcgtctcttgatgggggtgcccgaacctattttttcgaccagcagaaataaaaacttgcttaggatggattgcacgtaaaaagtctggattggatgatgttttactgccatgatgacccaatttaaaataatctacctgaagtttcatcctctgcataatttccttttcaccatcttgacctaaatctcctgtaaacaaccaattcttattcgctactctaaaaagcaaactcagggaatcttcattctttccttctcctgcttgatatggataaaccacattaaatgtaatctgcggttctttcacccgcattcctgcaagtaactccaataatttggtatcttttacacgaccatctaatctcttttgaaaagatggattcttaattagtccttcggccataaataatttcttaacattaacctgctctagtaatggtcctaaatcaccaacgtgatcggcatcttgatgcgaaacaaagactccatcaattgtattaattccctgacttttcaaaaatggaatagtaattcgatcaatctgaggtgtctgctttttgccactaaagtttagtttcccaccagtatcaattaaatataccttgcgaggaaatggcgtagtcactagaatactatctccttggcccacatcaatgaaggttacttgccctcgcaaaggaaaatgaatcatgctgaagaaaattacatacaagctcaacaagcccaccataattttcttactattaaagcgccagttaactttttctcttaaagaaacaattaaaataatcgttactattaatagcaacagacactgccaccaattaatttgcccaaaagttagtagtcccaacttagtagcagataattgcccaatgattttctcacctaattcaagcactttttctaataccggagcaaaatctttagtcagaccaaacgtcacaatattgaaaaaagcaattggtaaaactatccaattgaaatatggcactactaacatattaaaaattacagttaaaaaattgacctgataaaagaaaagcaatagtaatggcgttaataaaatatttaacaaaattgcttgtttaaaactgccaaacttatcagttaactgtaaacccaatgccaaaatatagctcaataaggctccagttgccagaaataaacgcggtactactaaaagatgtaaaatgcaggtcaatcccagcagatctatcgacgcaacatgatatttcttaaacttacaaattttgcctaaaaagtaggttaaactagctcttacaaagccggcttgaccattgcttagaaaaatacctagcaataaaaccaatgtacagcagacaaaagtttcttcatccgtcagtttcaagttaaaacaaaatacactaattaacaagacatagattccaacatgtaagcctgaaatgcttaacaagtgaataacacccaaatctcgataattatttagtatttcttgattttcttgagcattattttcacccaagattaattcactagcgaaaaagcctaataactgtggcatcttggcaaaatagttctgcaattcaaaacgtaattgatgcaattgatccccaaaatcagtaatcgataatagcttcatttgacaactactgtatttcaatttttggtaaatctgttttgcctgataataattctgaaaattaaactcaccaatattagttgctggctcaattgaattgcattccccattaatttctgtcactaaaatagggttcccatgcttaagcagttctttttgaacatctgttaccttgccaccaattaaaattttaccttgagcgaaattacccacacctgttaagtagtcgtctttaattcttacctgatcagggtaaattcttaattggctctgctgggttaaaacaaaattggtttttggtttacttaaaaaaatcagtaatagaaatgctccaactattagactaactatttttaaactaactcgatatttttgtactaacagtagcaaaaagtaacccagaaaaaataaagctactattttttgcaccattgttgtacaagaaaaagccaaaaaagagattgtaattagcaacaaagcggttattaagtaaaagccaacttcatttttaaacagccaattgatctttaaggctcgcaaaagttttttctcctattcctgatacctgcattaaatcttctatctttttaaaagaaccattttgttcacgataagcaataatctgttctgcctttttttgaccaattccagttaacttttgtagttccgttacattagcagtatttaagttgatcttagtgccatccccttgattacttgggctactgctactagtactcccactattttgactattatcagctgatcctgcagttgccacattttcaaccttttcacccttgtaaggaatatgaattttatcttgatccttaagcaaagtagcgcggttaatagcttttaattgtgctctagcagtagtacctccagccgcctcaattaactcctgcagacgagcaccatttttcaatgtatatactccctgatgcttcaccgcaccggaaatatcacaagttacagtcttagaaacggttgttgaactactgctagtcactgcattagtattagtggttgcacctgaactactagtgctagactgcataacttgatcctgcactgcagcagcattttcttgatgatcccctttcttcaatccataaaatccaactacaagaattattgcaccaatgagatatgcttttttctcaagcacaaattcttttactttttcaaaattcataaaaatcacctctactatttattacgcaaaaaaagcccagaattttttctagacttcaaattttttgaatttttttagtagtgtgtctttagatagtttaatgcatcatcaaaagtgctcacagggacaattttcattttggtgtgaattttctttgcggttctcttagcaaccgcataattagtttcacttttcttcacactggttgaatcagtcggcgcaaagaagacctctgcaccttctctgctagcagctaccacttttttatcaacaccaccaatgattcctacttttccggtaggtgaaatcgtacctgttcccgcaatcttatgtcccttacttaagttctgcttggtaaagacctcatagctttcaagtgtaaacatcaatccggctgaggggccaccgatttcgccagcattaatttttaacttaggcttagttttcacaactacatgctcaactaattgaatcccaattcctggcttattagtaccctttactttaacaattttgccagtaaagtgtttctcttgcttaccacgcaaaactgagattgttactcgtgcaccaatcttttgtttacgcaaataatccatcatctcttcagttgagctgaaacgatgcccgtttgcgcctaaaacggtatcaccaatttggagcttatttttaaaactagaatttttctggacttccattacataaacgcctagatattttaagctatgctggttacctgcttttttagctgcataataaattgcattctgctgacttgtttccatataccagttttgcaactcattatattgagcactagtttgacctcctagcagctccttgcttgatacacgctcatcatacggacgagtaaaactccatagatattgcaaaaccggagccggccgactagttatgctaactgtcaccaaataaaaattattcggacgtttatttgatgacttaataaactggcccacgggcattgcctcaccaggatattcaatataataatcggtcggccaaacagcaagtaccactaataaaacaagcgcaattagtgccaagagccaattacgcaagtgctttttcgattgattgtttttcttattattcatgttttagcttctctctcaatgcaatcgctgcttttttaggtaaaaacagactaacatcttcatcaaaacgagctaattccttaatcatgcttgaagctacaaaagaattttctggactcgtaaaaagcaaaactgtattcacatctggagccaattttttattaatcccagcaatctcctgttcatagcggaaatcagcactgttgcgtacaccgcgcaccataactttagcatgcaattcatgtgctaaatttacagttacttcttccggtctttctagcacttcaatattaggtatttcccttagtgcatccctgattagatcagcacgttcttcaggcgtaaacaagtatttcttagctgtattggtcatcgcaactacatatactttatcaaaaatttcagcagcctttttagcggtctccacatgcccattagtaatcggatcaaaactccctggaaataaagcgattgtcattattagtcctttcgataaatcctcacaattgtttttcctaaatggtgttctttgatcaatgaaaaaccagtaatttcacccagttctgtatgatcatcagtttctgctaccacaattgcatgatcattaagtaggttcgactttaccatctgcaacatgtccttagcgattttttctttggcatagggcggatcaagaaaaactagatcaaacttttcatcattctcagaaaataattttaatgctgcagagctgcgcatattataaacattaaaacgctgctcttccttagttaaagcaacatttttcttaataattgtacaagcagcatgattaatatcaaccagactcgcatggtcacagccccttgaaacagcttcaattcctaaggcaccactaccagcatataagtctaaaacattaccaccctgaaaaaattgtcccaatgaattaaaaagggattctttcaccttatcactggttggtcttgtccgattacttttcaaagtaaataaatttcttttagcatatttccctgaaataattctcattttagttgattctcacttttttcttgttcaagttgcaatttcttttctgctttttgggccatctcagctaattgattttcaatatgttggctatccaaatttacttcttcttcagctgaaatttcgacatgattaacaaaatccaaatgagcaatttgtcctttgatttcattgcattcgttgcgattaacataaagaacacaatatttcatttttttagaaaaataaacaatgtcaccaaaatggcgcaacttatattgatcactaactgattttaaataaataatcaatgctacccttttaattaagtgggtactttcaatttctttattgatactcatgcaactgtttcatccttttcctgtaacattttttcatttgctgaaacgttcagtactaaaccaatcgcagcagtcaagacaatcattgatgaaccaccatatgaaataaatggcagcgtaacccccgtaatcggcaacaatcctagtactgcaccgatattaaagaatgcttctgtaaaaataatagtcgtcacgccaaagcaaattaatgcgtcgaattgagaaaccgcgtgaaccccaacttccataatctgccacatcaaataaaagagtaatccaaccaataaaattgtcagaatcacacctacttcttctgctgtaatggataaaataaagtcggtatacggctctggtaagtaacctcgcttttgcatactattacctagtcctacgccaaataatcccccattgtggattgcataataggagttaactagctgggccccacctttttgctctaattcaaagggatgcaagaacgacattagtcgttggaattgataacttctttgtaaaaatccaggattccaggcaactacaataaaaaatacagctgtcactaagatcacaatcccagctaaccaagttaaagctaatttagttggaacccctgatactgaaaacattactaaagtgatcataaataaaattgctgtcccaccaaaatcaggttcaacaataaccaaacacattaaaaaagccgccaaaattgctgggtgtgacaaattatgtttgatcttacccttgactaattttccatctcttctgtctagtacatatgacaaataaatgaccagagccaatttagtaacttctagtggctgcaaattgataaagcccaagttaatccaacctacagcaccattaactgccgcactactgccatgagcaaaacgtagaaatactagccatcctaacataagtatacaaattaataaaaatccccctacaaactttggatttttaaatactttgattcttaatgcaaaaaacggaatcccaaacaaaaagaaagctactatagcatagattgcttgccgtatcccatagacatttggcttaaatccattaactaataaaatatctgaactagctgaatataccaaaattatcccaaccactactaaaataagatagggaataaaaatctggtaattaagataacgtaattttcgacgcacaagcgttgcccctttatctaaataatacttttttcattataaaacaaaaagatcatcacttctatcaagtgacgaccttttaaaatttattaaactatcttagttagcacggttacgcttcttatcagccttttgacgttctgaagtgttcaaaatcttcttacgtaaacgaatagattcgggagttacttcacaatattcatcatcatttaagaattcgatagcttcttcaagagtcaacgttctaggagtcttaatagcagcagcgtggtccttaccggcagcacgagtgttagttaagttcttacccttagttacgttaacagcaatatcacgttcacgtgatgattgtccaacaatcataccttcgtaaacttcaacaccagcaccgatgaataactcaccacgttgttctactgattgaagtgagtaagtagttgattgaccttggttaatggataccaatgcaccattacgacgacctgggttccagttctttactactggcttatatgcttcaaaggtgtggttcatgataccatatccaccagtttgtgacatgaattcattattgtaaccaatcaaaccacgtgatggaactaaaaattcaagacgagtttgaccattaccagttgattccatattcttcatctcaccttttctttgtgaaagtgagtcaataacagaaccaacatattcatctggagtatcgatttgtactgattcaaatggttcgcacatagtaccatcaatttcacggtaaataaccttaggacgtgaaagttgtaattcgaagccttcacgacgaagttcttcaaccaaaattgaaaggtgaagttcaccacgacctgaaacagtccaagcgttcaattgatcagttggttcaaccttcaaagaaacatcggtacgagtttgacgaatcaaacgatcttcaagcttcttaggagttacttgatcaccttcacgacctgcaaatggtgaatcgttggcaacaaagtccatttgaagagttggtggatcaatcttaagaagtggcaatgcttctggatgttcagctgatgcaatagtttcacccacgtagatatcattaataccactaatggcaataatatctccagccttagcttccttaatttcgttacgtttcaagccaaagtaaccaaataacttagtaacacggaagttttgagttgaaccatcacgcttcataacagtgatgttgtcactaactttaaccttaccacggtaaattctaccaacaccgatacgaccaacatagtcatcccaatcaagcatggtgatttggaattgtaatggctcatcagagttgtctactggagcaggaatattcttaataatggtatcaaagattggatccatagtttccttttgagtacttggatctggatcatatgatgaagtaccattcaaagctgatgcataaacaactgggaagtcaagctgttcatcgttggcacctaattcgatgaaaagttcaagtacatcatccaaaaccttcttaggacgagcgcctggacggtcaatcttgtttaaaacaacgataggttttacgccagcttccaaagctttctttaaaacgaaacgagtctgtggcattggaccttcataggcatcaaccaaaagcaatgcaccgtcaaccatgtgcataacacgttctacttccccaccaaagtcagcgtgacctggtgtatccaagatgttgatagtagtatccttatacttaacagcagtgttcttagacaaaatagtaataccgcgttcacgttcaatggcatttgagtccatagcacgatcttccagattcatgtgttctggcaaagtatcagattgcttcaataattggttaaccaaggtagtcttaccgtggtcaacgtgggcaatgatcgcaatgtttcttagatcgtctcttcttttttctgacaaaagtattcctccccactcttcaataaaaaaactgtgactctgtcacagtttcggtaacgcattagcgccttatcgaagtgcttttcttaaatctgtatagttacgttagtgaattttaccacctaactgcatacgggtcaacgcttaacaatcaagttaaccctggatttttttatgcaaaaacaagcaaaaactattaaactatggtaaaaatataatgtagataataatttttaaaaaggagtaattattttgatcttaatgaaagatatcgtacgtgacggtgatcccgtcttacgtcaagttgccaagcctttaacatttccatttagtgatcactataaaaaattagctgatgatatgatgcaatacttaattgattcacaagatcctaagattgctgaaaagcaccaattaagagcaggcgttggcctagccgcacctcaagtaggtgaaggtgtacaaatggctgcacttttagttcctgatgatcaaggcaaaattatctttaaagaagtttatgttaacccagagattgtctctgaatctgttcgtcaagcttgtcttagcgaaggtgaaggttgccttagtgttgatgaagttattaatggttacgttccccgccctgataaattaaccattcattactacaccgttgacggtgaagaaaaaaccattcgcttaaaggattacccagcaattgtttcttctcatgaaattgatcacttaaatggtcacttgttctatgaccgcattaataagcaggatccattcgcacttaaagaagatacagtcgtaatttcttaattgttatttaaccaaaacaagtgtctgggaaaaaactaagtctcagatcatgaaaaaagaacgttgaatttttgtttcaacgctctttttgtatacttttagctccagccttgatattattaaatcatcacaaaataaaaaaggtggaaactaacatgtacaagaattatatcacaggtcaaactgctttaacacttaatctagattttgccattccggccaatcatttggctaatgtcatcagctggtttgtagattcaattccagaagatgttttagtaggcaagactgctaaaacgggccgcccagcctatcatccagccatgatgctcaaaatactgctttttgcttactccagaagagttttttctggcagaaagattgagttgatgctggaagaaaatctgccaatgatgatcttggctgaccagcaaaagatttcatatcatactatcaataattttagatcaagcagccatgccaatgaactgattaaaaagagctttatctacttcactaacctgttagaagatgaaggcttaatcaatgaaggtgctgcttttatcgatggtactaagattgaagctgatgctaaccgctatacatttgtctggcgcaaagcggttgaaaagtatcatgaaaagctgaaaggccaggcagttgaactttatgatgaattgattactaaagaagtagtcaaagaaatggaaaaagaaaaagttcaaactagtcaggggctaaaggaattagctcaagaaactgaagcagaaattaacaagctgactaaagagattgagcaggaaaacaaagccattcctggcggttcacctcgaaaagccaagcgacgtggactaaaaaagattctgcaccggctaagaaaagattatgtgccaagaatgcaaaaatatgaagaagccgaagagatctttgccggacgcaacagttattccaaaacagatcatgacgccacctttatgcatatgaaggaagaccacatgaaaaatggtcaattaaagcctggctacaatattcaagcagtcacgaccgatcaatatgtagttgattatgccatctttcctaatccgacagatttcaaaactttggagccggttttggatcaaatgaccgtgttggacaagtttgacaaaatcgtcgccgatgctggctatggcagtgaatacaattattcgatgctggaggaaaaatatccagacaagaagtactttattccctacactatgtatgaaaaagaacagaccaaaaagtataagaatgatccaactaagctaatcaactggtactacaatgaaaaagatgattattacattgatcatcatggcgtcagattcaatttcaaatattacagccagcgtaaggatcgttctactggtcaggtccgtgattttaaggtttatgaggcagacgagttccagctaacgccagaattggaacaattggctaaaacagctagcggccgccagcgccaagttcgctataatcctaactggcaatatttaaaagaaaaagcaaaagaagttctccaaagcgaagaaggcagacacatctatggcatgagaaaatatgatgtagagccagttttcggacatttgaagaacgtatttggcatgcgcagaacgcacctgcgaggtaaagagaaggtcgaaaccgatatcggaattgcctttatgatgatgaatttgaacaaatattgtcaaagaaggtggctgaagggccgatttttattgttaaaaattttaaagagaacaaaaaaacgatcaagattcttaaaaaaggaaatcttgatcgtttttattcatctggaagctagttttttcccagacacttttgtataaaaaaagtcactggttaactaggccagtgactcatacattgggaattaagaagattgaagagacttcttataacgagcaaatgaatttattaatcatttactacatgattatcgtacaactgatgttattttacgtcaataacattgaccaaatttaatcggtaaaaatcaaaagaaacataattatatacttaactttataattatgataaaatttttatagctattgagtaatttttactctacattgaacgtttatacattaataaggagaatcatttatgatttacaaagttttgtatcaaaaagacaagattgtcaatcctcgtagagaaactacacaaactctttatatggaagcagacaacatggtcgaagcaagaagtatggttgaggacagtaccccctataacattgaactcatccaagaattaactggtaattcgttaacttacgaaaaagaacatgctgactttaagttaacaacgtgcgacaagaagtaataaagagtgcgaattaaaaataatgaagtagccgtttatgcaatcggggggttgcatgaaatcggcaaaaatatgtattgtgttcagtatcaggatgaaattatcatcatggactgtggtattaaattccccgaagataacctattaggtattaattacgttatttcagactattcttacctaatcaagaatcgtaagaaaatcaaagctcttgtggttagtcacggacatgaagaccatatcggtggtattccatttttgttagaaaaaattcctgaaattcctgtctatgcgacaccatttgccctttcattaattagaggcaaattggaagaacacggaattttaaagacaactgaactacacgaagagcatgaggatactgttttgaagtttaagaaactttccgtttctttctttagaactactcactctattcctgatactttaggtattgccgttcatacaccactcggtgccgttgtctttactggtgactttaagtttgacttaacaccagtaatggatcaacctgcaccagattttcaaaagatggctcaattaggcaatgaaggtgtacttgctcttctctcagattcaactaatgctgaagtaacacaatttactaagtctgaacgatttgtagctaagtcactacataatatcatcactggaatccacggtagaattatttttgccacttttgcatctaatctttatcgtgtatcaactgctattcaagctgcaattgataccggtagaaaggttgcaatttttggacgtagtatggaaaatggcgttgataatggggtcgacttgggctacttaaatttgcctaaggatctaattgttgacgcagatgagatcaacaaactaccacctgaaaaagtaatgattttatgtactggttctcaaggtgaaccattagccgctttatcgcgaattgctaatggtactcaccgtcaaatcagcttacaacctggtgatacagtcatcttctcctctaacccaattccaggtaacacattaagtgttaaccacttaattaataagttaatggaaggcggagccgatgttattcacggaagagtaaataacgttcatacttccggacacggcggccaagaagagttaaagatgatggttcgcttagttaagcctaagtacatgattcctgttcatggtgagtacagaatgcaggttattcacacccagcttgctcaacaagccggtgtacccgctgaaaacacttttgttttatctaatggtgaagttgtctgctttggccctgatggcgctagaatcacaggacatattcctgcaggtgacgtttacgttgatacttctggtactgcagatgttggcaacgttgttgttcatgatcgtcaaattctttctgaagaaggtttagttgttgcagttgctacagttgattataagcacaagcgagtcttagctggtcctgatattctcagtcgcggatttgtctacatgcgtgaatcaactgagttaattagtcaagcgcaaaagcatgtttatcatgtgcttagaaatgaaatggctaaatcaaatagaccaaaagaaagtgacattaaaaaggcgatcaccgaaaatctttcagacttcttgtattccaagactgaacgacggcctatgattttaccaatcattatcgaaaagaaatagtaaaaaagactccttagggagtcttttattttagaaaatgaataatatgcataaaaaaattaaagttcagttattagttaatgaggtcgctgggaatggcaatgctattaaagctgataaagaattacaagatatactaaaagaaatgaatacgcgtggtgctagttaaatcgttctagacaataagccaaattataagctaaaattgcaatttccaaccggctttgaaagcctatcagactacgtgctcgattgttctcggcattgtaataggtcagaagcgaaaagtcgctttcaattgttctgcgaatagccatcaattgatgatcattgtgctttttagctcctgtcatatttttacgatatggtgtccaaagttcgtaacccatttgttttagctgttgatgcagttctttgcctaaatagccttcgtcgccaagaagatagtaattagatggatgggtattttctatcagttcaactgtctccctggcatcatgaactgatgcctttgttacgacataatcaagaatgtaaccgtcatcgctaacaatggcatgaactttgaaaccatagaagtaaattttcttggtggccttataaccaatgttggcataaccgcgaaaaattttagcacgatagtttcgaattggttggcaaacaggtaccggaaagctgtcaatgatcaagaactgtccattcaggtcaacctttttattcatttcttgccgtatctgataaatcaattgcaatagctgacgtgaacgccgattaaaacgtgagtgtgataaacaattgaaacattcacagaatcttctttgtgattcaattcctgtcttagcttgccagataagtaaagccaaaatcagactgtccgtagttttaatttgatcaatatttcgccgatgagtaaactcagccggtgcatacaaacgataccagtgccgacaaattatcactaaatctttaaaactaacttgtaaatggtggctaaaacgcttaagcttaaggcagttcaatcagatcagactcttttctattattactatttacaagtcgagtctaacaagattggacttttttattaactaaaacgatttaactagcaccacgcgtaaatgaatattccttttaagcgacaaaaaagtcattatcctggagaattagtcgttctagcacaaaattacgctaatttacatctctcttctgaacatgttttaatcgtagttggtggagatggctcctttaatgaagttttaaatggaataaagacttctaattatcctgagacagctattacttatttgcctgcaggaacaggcaacgattttgcccgtggtgctggattaaccgcagatcccaggcaattaatcaacaatttgctccgagatcctgaaccggaacaagttgattgtggttttttcacatcaaatattaaacaaattcctaagggttactttgttaataatttcggtattggttttgatgcctttgttgttcatcagagtaatcatgagcaattaaaaaaacacctcaatcacctcaattctggaaatatgatttatggcctaaatataatcaaggcactaattaagcaggatacctttacagtgactgttaaaactaaaaacgaaactcttcgttacggagatgcatactttgtcactactactaaccatccctactttggcggtggttttgctattttgccaaaagcggacatttacagtcaccatcttgatacagtaattgttgaaaaaccgagtttacgcaagtttctctggctttttggtaagctgatcaaagatggttcacacgttaatgcaccagaatttcattatattgaagctaaagaaatcctagttcaaaccaataaaagtgaatatgctcaaattgatggtgaagatattgaaaagcagcccttcaaagtaacatttaaagttgatcattttaatttattaaaataaggaagaattccaaattcttccttttttatatcttatctaaaatatctcttttcgaattatgattttgataatattggtcctgatcaacgaaatcatgtacttgatcataaaatttcttccaataacggtatttttgatactgcttttgccactcccgtgcttcctgcaagtaattaccaagaagtccattaatctgatcgatatgtttaatcacctgattagcatgatacaattgctcttccacctgcttttgagttaacgttgactcctgatcttcaaaaaatagaacattttcttgataatttttttcttcttgcaattgtttactattgtccatttcttctttgatagctgcaatttcgtctggctgtaatccaattccagttttagctttgactaataacgactgaatatctgccaattgcacaacatctatttccattttttgataacggttcgaatcagtcaatgtgaactcatcatctgttctacttacaaatacaaccacgtttctgattaattgatctatatttggcaagcgtctcaataaattaataatcactgggttgttgcttttttctaggacatatttaatactttctttatgcttggccacttgatcggctatctgatcataatcagcctgcacattatactgtccatttttacttgttcgtgctttggtttccaagcaaaaaatcccgctagtcgtaattatcacatgatcaatttggttactccctaaactattctttttttcatagggatatggtaacagtaaattatgaattatttctttccctgtctgcacttcacgtaaacgagaattcactaattcttctgcggcagcgcctgccaagagattgctaagatggcgcaaatcacgttgagataaaatattcataggtcgcaaatgttttatttgattcaaatgtagttcagtcattcttttctgaaatgcgtttactttttgattgtaaaccttatagccagaattaattgcccgaattcgtaaaacattttgcagagccaaagctcgtttcaaatcacgtttattattcaacaaagttttttcaactatcatagcatcatgaacagtttgtgaatcagttacttttttatgtgtaatccaagctttttgataactagcatgattttctaactcattcacatactgatttaagtcattttccaaaggcaaaattttgtttctaccttctttgactattgagccataatagcgcaaattttttgtaatttcgtctaactcattgaattcatgtttgccataatggtaagttaccttagtttctccattccaactagtcttacgccaataatgaccatccgtctcaccaaattcaactaattccgccactgaacgatctaaatagtacttaatcaaataatgacaatggcctttattgtcaaaaatgcgtcgcttaatataacccggtcgcattaattcaatgatctgaaaggtcaagttcttatgattaggaaaacggtatggtaatcttttgcctgcaattttttcaattttagttatttctttcttatctgttacagataattctatttttttcattttcttcttttttcgcttttgaaaaaaataataggttaataagcctattgttagtgtaattattgtaatatccatgttaattatccatattttggaacgtatgtttagacaacaataattataccatgattttgtataatgaaaaagccccttgttttaacaattcaaggggcttttatccttataatttgatattttccattccaatcattggatcaatttcaccagaatatattttttccgaggttagaacaaaatcttctgctacttctgctttatcggtttcattctccatttcttgagctttttcgtgctgcttgctttgatcagatttatccaatgattttgtaatacccaattgctgacaaatcttcgctgctaagccagtcttacgatcatttcccggcgtcttaaaagctgccacaaatgcccgtggatcaccaactaatactaagtttttctcagctcgcgttattgcagtatacaaaaggtttcgttttagcatcacaaaattctgcatggttagattcaagatcaccaatggaaattctgaaccttgtgatttatgaatagtgattgcataagcccgggtcagatcatttaaatcttttctagaaaaggcaacttctcttccatcaaaatctgcaatcatgcattccttggcatcatcttcatcaatgctaatgatcttaccaatttgtccattataaatatctttttcaggattattttgcaattgcagaatacgatcgccaattcggaaaacttcattatgtgcttctaataccttacttttaggctgagatgggtttaaaattgcctgaataacattattaagattagttacaccaccattgccaagatacatcgcgctaagcacttgaatatcatcttttgcaaatccacgttttaaagcaagtttaacaatttgtccaactgcatcccctactaattcgggacgacagctaataaaagaataattatttgttttcttaaacaatgcttgctgatctttaccctcattaacatcatgcgccaaagtaataatcgttgaatcatcaccctgtctatgaatctgcttcaaaatagtagttggaaacgcttgcgatttaatcaggtcactgaagacattgccagctccaaccgaaggtaactgatccttatcaccaacgaaaacaatatgccgcgtatcatgaatacttgccaaaagttgtttaaaaaggaacatgtcaaccatcgacatttcatcaacaattaagatttcaccatttaactcattcaagtcctgagtgttagtatcaccaatacctaaccccaacattcggtgaattgttttagcactgattccggtaatttcacccattcttttagctgcacgtccagtcggtgctgctagtaaaaacggaggatcttcactgtaaagagcggaggaaggaatctcagccagcttgcgtaatactaataaaattccattaatgatagtagttttacctgtacctggtccacctgtcaaaatagaaatcggttggttaactgcgtttttgatggccaacttctgtgtatcgtcgtagtgaatcttaagttccttttcagcatccttgattgcttgctctacctttttatcatcatattgttctctttttttatcttcttttttttctaccaagtttttcatcaagcgagcaatatcaacttctgtttgataaatattttgtagagcagcattctcaccatcaactattactttgccagcttcttgtaaactattaatacagctagcaattgggtcgaattgattgatttgaagcaatttacttgcttctgttaataactcagctaagcctacataagtatctccctcaccatttaaagcatcgagtaatacttgataaacagcacctttaattctacgtggatcatcactagcaatatctaattggcttcccatcatatccgcggttttaaatgcaaaacccgaaatatcattaactgctgcataaggatctttctctagttttgctaatgcttcaccatgataaagctggtaaacccgtcctgcaatacgcttattaatgccgtatttagccaattttaaaattacttctgaataagaatccatcgcatttagtcctgccaaaagactatccttttgctttctagttaaagaaagcttatcaatcttagctggactttccttcaatacatctaaggcatttagccctaattcatcaataatcgtagtcgcagcctttttaccaattccagggaacttattcgaactcaaatacttagttaaagatccctcttcatgtggcaatacttgcttatagttatttgctctaaactgcaagccaaatttttcatgcattactagtttaccctcgaagcgatagctactattaatttgaatatcgccaaaattccctgtcaccttaatatcgggacgagaataatcggataaagtgccgataatttcaacgtcaagaattttatacaagtctttactattttcaaaaacaatcccgttaaccttaccggtaaattcattcataatttttcttttccttgtcatttagcatcttcataattgaagcatactgattcattgcttgttgataatacttagcatccatctgcttagcttgagcaaaatatttttgagcctggtcacgatctttttctaatgtagtgacacctagtaaaaaataaactttcgcatttttcttattatcaggaattgccaaatacatttgctgagcctgttgattctcacccaaacttaaccaaatatcgcctagcaattcctgaattcgctcatcaatttttttgatcgtcaaagcataagctaaagctttttggccttgccctaattttaagtaagttagtgccttttgataaagagttaagtcatcattaggtatctgatctaataaagccagtgctttatcaaaatcgccttgcatgtaataacacactgccagattataatttaattcttgtggctctttaaccagatgctgggcctgctccaatagcttctgtgcttgatccaagcttccttgctcaattaaatacgtcgatagctgcaaataattagcaacttgttgtggatgctgatcgatttttttgattaaaagatgaatggcttgttctactttaccttcatcataaagttgcgctattttttgatccattataacgagtccgtcttcgataatttacgtcctaaataactagtttcattccacactaccggtttaaaagtctttccgccatctagtgtttctaagacagttaaagaggtattgctaaggccgccatttttgcgaatatctttcaatggatagcctaaaagtccacccataatagctgataatgccgcaccatgactaactgctagaatcttatcatcatcgtcaggaaatctttgtgccatttcttgagcaaatgcttttccacgagcaataacatgtggataatcctcaccatgaagttcagtcggatcatatttatctggatggtgccaaaaattatccatttgtttagggaattttttctctgcatccccaaacttcattccctccatatcgcccaaattaaactctctgagtcgttcatcgatcacaacaggtaagttagcgttcattgcatcatcgatgccctgagcggtattaaaggcccgatcaagcggactggcaaaaattcctctaaatttagttccttgcaagtgatgacctaatttttttatatcttctaagctttgtggcaaaagtggtgaatctccatgtcctccttggaagcgactagctaaattccactcagttttgccatgacgaacaaaataaatttgcattgcttaaatccccctaattgtctaatcaataagaatagtttagcacaaagaaaaaggcgttcgaaaaatcgaacgctctttttgcatattttttaaactaattgtaattgcttttcttcttggtaagcagcatcaatattaccgccacctaaacattcttcacccttgtataaaacaagtgcttgacctggtgtaactgcacgagctggctcatcaaagtaaacatcagcagtattgtctgcggcatgatacttaacagtcacgccgatatcacattgacgataacggaactttgcagtacagtgcatctcaaaatcatgatctggcttaccagtaaagaatgacatatcacttgcattcaagcgactagcatatagaagtggactatcatagccctgctctacaattaattcattcttcttaagatccttgccgaccacgaaccatggatcagttgattccttagttgagcccaagcccaagccctgtctttgaccaatggtgtagtacattaaaccagcatgctcaccaactaccttaccatcaggagtgaccatcttacctgatttagctggtaagaattcacttaaaaactttctaaagtttctctcaccaataaagcagatacctgtagaatcttttttcttcgcggtagctaaaccattagccaaagcaatctctctaacttgtggcttagttaggttagctagagggaaaataaccttactaatctgctcttgactcaattggctcaaaaagtacgtctggtccttgttaccatccttaggacgcatcatatgagtaacaccattggtatccttaacagtcttagcatagtgccccattgcaatgtagtcagcatccaagtccatcgcaaactccaagaacgacttgaacttaatctgactattgcacattacatcaggattaggggttcttcccttcttgtattcatccaagaaatattcaaaaacgcggtgccaatactctttttcaaaattaattgaataatatggaataccaatcttatcggcaaccttttttacatcttcatagtcttcagtagctgtacagacgcctgaatcatcggtatcatcccaattcttcataaagacaccaacaacatcgtagccttgttgtttaagtaaaagtgctgaaacagacgagtcaacgccaccactcatacctacaactactctagtcttgctattgtcaaccattattcaatcaatcctttacttcaagcaaaatcttacgctcctcaagatcctttaaaatataatctaaaagttctacagtaggagctaattgcttatttttaaaaatattaaccttctgcaaaccgttgcgatcagtaataaccatagttaaatgcgacaagtccttattaatggtcatctttaacttagtaggcgcgttataaggtgaatcattgtaaagaggatgttcataattaaaattacccttagctgtcttcacaaagccagcatcaatcaaagcataaagcttcaactcaagattcaaagtaaacttacgtttatcaccattaatcacaactgtatttgccataattttcctcacttatttataataagatactttctttttgaaagcaactatttatttttagattgaattctttgtacaatttttactaattcttgagcgaattgctcaatttcttcatccgtattataacgcccaaatgaaattcggatcgactcatttattcttggtgaattttctccaaaacaagcaattaaaacatgtgatggctccaaagaaccagcagtacatgctgaaccgcctgacacggcaaatccattcaaatcaagatttgtttgtaaagaagtagtagatacaccattgagatgcagattaagcacatgatgtgagtaacccggaccatacccaccattaatttcataattaatttgatgatcgtctaattcctttaaaataatgtcttgataatgagcatatttcttttgcaaagcatcacgaccaatctcggatacttcacggacagcttcgccaaagccggcaattcctggtacgttctctgttccagctcgacgtttggtttcctgctcaccgcctaaaatcaaatttggaatatcgatatccgcattttcatataaaaagcctaaaaacttaggtccattaattttatgtgcagaaacagacagaaaatcaatgttcatgtccttaacatcaattttaattgtgcccattccctgaacattgtcaacatgaaaatatgcattggagtcctttaccattgccccgatttctttgagcggcataatggtaccaacttcattgttaacggccataatcgatactaaaatagtgtctggcgttaattccttttttaactgttctaaagaaatttgcccgttttcatcgacattcaaatagacaatgttgtagccctcattttccaaacgtttcattggattaagaaccgagggatgttcgatcggcgtagtaataatctttttaccaatatttttacgagcataggcagttccaagaatcgctgtattattgctttctgaaccacctgaagtaaaaataatctctccatcttgagcattaatatcttgagcaatctggtgacgagctcgatcaattacatttctggccctacgacctaattcataggtactagaggcattaccaaaatcatttttcatttcatcggtaataatatcaattaccttgggtgacattggtgtcgttgccgcattatctaaataaatttcacgcacgtttaattcatcttttctacataatcactaattaacttagctgccttagcgccgacttccttgacaaacttgtcaaaatcattgtctgcattagcatccccattatcggaaattgcacgcatagcaaccaacggagttttaaaatgacgagcaacttgtgcaaaagcggctccttccatttctactcctaaagcttctggaaagtttttcttgattaactctttttgttcttctgattgaacaaaagtatctccagtaacaacaagcccttccttaaaatctacgtcttcttcacctaaatatttcttaaatgcttccctttcaggcgaattcaacttaaaggtagcaggctctcttggaatctgaccttctacatattcaccggcactaacacagtgagcatcgtgataggcaaaatcatttactaaaatcacatctttacgatgaacatcatcttgtaatgatccagcagaaccagtcataaaaattacatcaattttttctttagttagtaaactagtcagattcatagcggcattcactttaccgataccacttaaacctaaatatacatcattgccattaacagaaaaatgttcgaattctgttgatccgaacatttcttttgtttctgcatggaaatgatcacgataaaattcagcttcttccgccattgggacgataatcgcaatcttcaatttatttcctcatttccactataaatgaaatagtgctaatagcaccaatataattaaaacaatcactatcaggatagcacgattcaatctttttttcagtcttaaagacttctcttggcgaatcgtttccttatcactcgattgattatgctgataaaattcttgtccatccccagccagagggcgtcttctaggttcttcttcagagtcatcccgcttaaagtcaggatttacatctacttcttctgaatcattatcagaaaaggaagattttagcttattaagtaggctttttttctgccttttacgataatcagagcgtttttctaccataactaatccttattatcggtctgagcattacgcaacatcatattctcccaaacagtaattgcataaattgtctttgcatcaacaatttttccttcagccaataaagtttttaattcatctaagctataccaactagaagttaaaaattcatctgcatccagtgcccgcttatcagtcaatttagttaaggtatcacaatagaaaagatacatcttttcatcacaaaaaccaggagaagaatagaattcactgaccttttcccagtaatctgtgcgatagccaccttcttcattcagctcacgcttcattgcatcaagcggacttgcatcagtggaatcaaccaaaccagctggaatttccaaagtaatctgcttaattggttcccgccattgctttactaacaacatcttttgttcatcattaattgcaataacagccgatgcaggcttatgcttaataacttctctagttgcagtttcaccattaggaagcttaattgtacgaacagccagatccaaaatacgtccttgaaaaatctgctgtgacgagatttctgtttcctttaaatccaaaatcccagctcctttttaggctaaataaacatttacacattgcagaccatttttaccttgagctaactgatatttaactctttgacctacttgcaaagttttatagccttcctctttaattgctttatagaagacaaaatatgacttatgattacgatcatcttcaataaagccatagctactgccttcatcaaattgttttacagtacctaaccgcattagttttcaaatccttcttgaacagcttctgggtaatctgcttcaacgattttagcacaacgaccacaaagcattggcaactttggatctacgccaatatcagttctaatcatccgacaacgaggacatacttcgccttcagcatgttcaactactacactagcattattcaattgctttgcattatcaggtgcttcaccatcagcaatagttaacttagatacaattagaatttgtctgaaatcagcatccaagtcttggagcattgccttagtttccttatctgggtaaatagttactgttgcttcaaacgatttaccaattaacttcttatttcttgcatcttctagagccttcaagacgtcatcacgcaacttcatgaatttaccccaattttcaagcaaatcatcatggttagcatattcttcaacttctggcatattagcaagttgaacgtaatcttcaggttctttcaagaagccccagatttcttccatagtgtgtggcaaaattggtgttaagatcttagccaatttaacagcagcgtcgtaaataacagtttgcattgagcgacgatcatggctgttttcaccatcaatgtaaagtacatccttagcaaaatcaagataaaatgcagaaagatcattagaaacaaagttgaagaccttcttgaagacagtagtaaaatcaaacttgtcgtaagcagcaagacagtctttaactaagtcatttaatttcacttccatgtattgatcaactgaacgaagatcagcataagcaacgcgattttcttttggatcaaaatcactagtgttggccaacatgtaacggaaggtatttctgatcttacggtaactttctgcagactgctgcaaaattcccattgagactgcaacatcagaagtagtatcagcttgagctacccaaagacgaataatttcagcacccatcttcttaattacatcgtttggtgaaattacattgccaagtgacttagacatcttgtgtcccttatcatcaagcacaaagccttgtgataatacttctttataaggtgccttaccagttactgcaacagacgtaatcaaactcgaattgaaccaaccacggtattggtcactaccttcaagataaagatcagctggatagtgtaaaccatcacgtttttccattacgcctgaccaagatgaaccagagtcgaaccaaacatcaagaatatctttttctttagtaaactcgccatttggtgaatgttctgaagtaaagccttctggcaacagttccttagctgtatgagtgtaccaagcatttgaaccttctttttcaaagatcttggcaatatggtcaatcgtttctggagtaacaattggggtaccgtcttctgcatagaagatcggcaatggtacaccccaagcacgctgacgagaaattacccagtcgccacgatctttaatcatgttgtaaagacgagtcttcccccatgaaggaataaagttagcttgttcaatttgatccagaatttgatctctaaacttagaaattgaagcaaaccattgagtagttgctctgaagacaacgggcttcttagtacgccaatcatgtgggtatgagtgagtaaagaagcttaacttgagcaaagcgccagcctttttaagcttatctgctaccaccttgttagcatcatcatagaacattcctacaagatctggatctggaatatctttagtaaagcgaccttgtgcgtccattggactgaagaccgggataccatacttttgaccaacacggtagtcatcttcaccaaaaccagtagcgttgtgaactaagccggtaccgtcatcatcagtaacataggtgtcattcattaccaaaccatattggcctacaccagtcttaccataaaggggatgcttataagtcatcccatcaaaatcagtaccttttaattgtttaagtactttgtagtccttccagcctaagtcttctgcaatggctggcaaacgatctgaaccaattacatacttcttaccgtcaacttctactaaggagtagtcaaatcttggattaacggtaatacccacgttacttggaatagtccaaggagtagtagtccaaattactaatgaaacatctgaatctaagatacctttaccatctttaattggaaaagcaacataaattctaggtgatttaatatcatggtattctacttcagcttcagctaaagtggattcacttgaccatgaccagtaaactggcttcaagcccttataaatataaccttttttatacatttctccaaagacgcgaatttcttgtgcttcaaagtcatgttgcaaggtaatatatggattatcccaatctgccataacgcctagacgcttaaagtcggccatttgcttttgaacttgttcttcagcatattgtcgacaaagctcgcgatacttagcacgatccattgtcttacggtcaacgccttgcttagctaattgttgttcaactggaagaccatgagtatcccaacctggtacatatggtgcataataaccgttcatattcttgtagcgaacaatgatgtctttagaaatcttgttcaacgcatgtcccatatgaatattaccattagcaaatggagggccatcatgtaaatcaaaacgaggcttaccttcgtttaactttaatctttgttcatataacttgttatcttcccattctttttgccattcagcttcacgaacaggtagattaccgcgcatcttaaatttagttttacctaaattaagggtatctttgattctcattaacaaaattcctttctaaaaaagaaagcctcatcctaaaattaggacgaggctaaccgtggtaccacctaaattgaacttattataagttccacttaactttgcgtaacgtgcaaataccgtttagattaattaggcagctgatcagctcttaggctcttatgctagtcttccaccatcactagctcgctgaattgccttcaagctttactgtcaatctaatatgcttattttttatagtcgtcaggaaaaacaattgttgggcctaaaggatctgatttcatttcaggcttaacattaattgtttcatgacttggactgtccccggtcattggtttaggtgcagcattttcttcattatctgcatcgtcagaatcatccggttgatccaactccaaatcatcagggccttgagaagagtttacgtcattttcatcatcattgtcaacatcttcatcttcaacgtcttcatcatcagcacttactggctccgaaccatcatctggataataacgctctaagttgaagtaatcatccaatgcatgttgccacttttcatcattcaaattatcgatttcagtctgtagcatttcttgaatattactacgaaattcactaacttgctcttttacacgcatataatccgtagaaatagtatcttgttgatgcttttggaagttaatattatcttccgcttgctttttggcatccgcaataatctgcttagcctctgcttctgctttctctctaatttcatcagcagtttgttgtgccgaaattaatgatttatttaaagaacgctttttttcgttatattcattaacttgatcttgataatcatctactttttcttgtaaatcagttaactttttatttaaagaaactacttcattcttcaagtcaaccacttgatcaagtgtatcaccataatcatcaacaatctgatctaagaagctatctacttcaagacgatcatatccattacgaccacgccgtttaaattccttgttgtgaatatccatcggggtcaattgtgtttctttgtctgccaaagtctgagcaccaccttatatttaccttttcttgtagtcgaaacatcctcaatcaaaatccgaccaaagtgtcttaaactcaagacatcgtcttctttaatcattatattagaatctgctatttcatgccaatttaatttaaccagctgactattaatcatcttttgaatttgaccgcggctttgtctgctaatacccgataatacagcatcaattcgcattgaggcaactattttcgttttttcaatcgaatcatcctcaggaaccaaaacttctttgaagctaatcggtctcagctttacttttgctctgccaatgcggtcaatttgctcttcaaaaaattccgtcatttcttttttagtgaaaaactgccattttccttgattatcattaataatatcgccaaaaatacttgtatcaatacccgaattcgccaaggtgcctaaaataacactatgatttattttagtaaatttttgcggatattcaatttcatacggctgaatctgataatcactcggtcgcagattaagccattcttcacttaaataaactcgctttttctctgcattaggatagccaccatactcttgaacaaatgcatcattaccaacaattgttcttaaaattgctcgttttcccggatccaaaaaatcagtcaaaattggctcatgcttaaaaatcagctgattaaaaagaccagtaaaatagtcaattactggtctttcctcttgattaaaatgtgggtaaaacttacttgcctgtctgcgttccattacaccatcatcctcaataaaatatcaaatatccatcttaaaacatagttttgaatgaaatataagataaataaagcaataattggcgagacatcaattccagttgaataagctaatctcgcaaatggaccttttcgaaacaaatttaaatatggatttacaaccttgtctaaaaagcgaccaacaacagaattacttagcattggtagccaactcataattgcatcaatcacgatcagcagactataaagccataaaatccacgtcagtgccaagtagattaaatttaatatattaaccattagcttaaattgtctttcttatccactaaatcactaattttgccatcagtaacaaactttggtggagttgctaaaaagattttatcaccaatacgttggatttcaccatttaatgcatatacagtacccgtgatgaaatcaacaatccgacgtgctgaactgtcttccattctgctaaaattaatcactactgctttattatttaataaattttgtgcaacatccttagcatcggaatatacccgtggttcatataaaacaatcttgcttttagccgaattcaagcctgatttaattgaaaccacattatcgcgattaactgagttcagaggcaagtcttcattttcatttttagtctgtgaggcatattcttcgtcattttctaattcatcatcattagaaattccgaaaaatcttcctaatttatcaaaagccatttatactacctccaaaactagttttcactacgatgtttaaaaaatggaatatcactgttatcatcactatcgtcctgagcgctagtttcaatttgagaaatactatcctggtcttcatcactaaaagtatcaaaaccctcataatctttcttaggctcagtaggttgggtatttcttctttgattgtcttcgctatcatttagtccccaaacactggttggatcaaccatcgtttgcttaggctgctcaggttcttgtttttcggcagcaggctgaactgtttgtggtcgatcaactggttgcttaggttcttcagccttaggagcttcttctttttctttaactggttgagccttaatttgttggctacgacctggtaattgcttagaagcagcttcttcagccttagaatcaattccagtagcgattacagttactaccacctcatcgcccaagttaggattaattgaagtaccgaaaataatgtttacatcgtcaccagcagccttagaaacaatctctgaagcatcttgagcctcaaataatgtaaggtcaggtccaccagtaatgttaagtaacacttgcttagcaccatcaatagaaacttctaataatggtgaagaaatcgccagcttagtagcttcaactgttctattttcaccgctagcacggccaattcccattaaagctgcaccttgattttccattacagtcttcacatcagcaaagtccaagtttacgtagtcagttgaagtaatcaaatcagaaataccttgaacaccttgcttcaagacattatcagcttccttgaaggcatccatcataggagtcttcttgtcaaccatttcaagcaaacgattgttagctataataaccaaagtatcaacatattgctttagctgagtaataccttctgcagcgtttttagagcgcttagggccttcaaaactgaatggacgtgtaactacgcctacagttaatgcgcccgtctcacgcgcaatttttgccactacaggagccgcaccagtaccggtaccgccacccataccagcagtaataaagatcatatctgcacccttaagtgcatcttcaatcgtttgttcactctcttctgcagctttttgtcctacttcaggatgtgaaccagcacccaacccacgggtcaacttaggccctagttgaatcttgttttcagctttgttgctgttcaaagcctgaacatcagtgtttgctgcaataaaagaaacaccttgtacgccatcgtcaatcattcggttaacagcattgccgccggcaccaccaacaccaattactttgatgacagcattcttattgtcgtctgaatcgaatgtaaaatccattaaattaaccacctttaatcaaagaatttcttaaagaaactcttcaagctattagttttttcttgcttagtattattttcatcgtctggcacagattctgttctggcagacattttgcttctattataagcttctttagcttcactttcactattagaagtcgtacttttagaaatcttggtactttttggctgagaaacggggtcttccacagcgggttcaccaaaaccatagattacgccattaacaagatagtcaacttcagacatcttatatgaatagtggacgataccataagcagctgtataaatcggattacgcataccaatttgatctggttcataaattcgggccttaacatttaacccattagcagtcagactatcaattccttgtaataggctactaccacctgtaatcacaataccacctggttgcttcaatgcattatgcttaactaaaccttttcctaaacgagtcaaaatttgttctaagcgtgcattaataatttcactaagatatacttcgtcaaccatttgctgactatttgcaccaacactattaatagcaaatttatcgttttttgaggcaaattgtggatccgcaaatccatagtccaacttaatttgttcagcatcctttttcgaaatacttaaaacagcagagatatcattagtaatatcgcttccgccttctaaatcgatgttggcatacttaatttggccatctttaataacagttgccgtacttacgccaccaccaagatcgataattaccgaaccaaaagttttttcactttcattcaatgctacacttgaaattgctaaaggcgttggcacaaagaaattattatgataaccggctctttcaatagccttcttgatattgtgcaaaggactagtaggtgcagttaataaaattccactaacacccaaggaacgtgcaatcatttttcttggatcatcaacttcagttttaccatcaatcaaaaagcgactcggcaaaaatgtaattgcttcacgatcatccttagctgctgaatgaatcgcagatctaatcgttctttttacatcatcattatttacttcttgcccttgttcaccaacattagcaaaaccagttgcagtttccagttgtaacatccctaccggaattcctgtaactacactataaatcttggcgtttgttttttctgctacaccttttaatgcacgactaattgcactagcagtttgatcaatatctactatttgaccgtgtcgcattcctgaatttggcgttgtaactgcaccgataaccttaccagaatctgcaacaacggcttttacacttgtggttcctatatctaaacccactaaaagatttgaattctccaaaattaagcccccattaatatttgccttgaaaaaattctaacataaataaacttgcaaaacagctacgatatgccataagctttcttttcactagaagttaatggtctactaaatgcacctatttctaaatcaataaggctatgtttaccagctttaattctaatagtatcataatattttagtttgctattcaaagtagcagtattgccaatcactacattaccgtccttcattactaaaataatttgtgaatttcgtctggtattcccacttaataattttacctgatttttaaatgaattaggtaaactgttaaataactttaaatcattttttaactcatctgatttattatagccaacaaaaataggtttatcttggttcacttttgtccaaggtagagctctcgtacctatttttccattatccaaaatctttcggtaagaataaccatcttttaagtaacccacggttttacgttcattaatttgtaaaatcaattgattaatatgacctaaatgaacttgtgcactttgaatttctggatatttttgggataatctttgactcaaatctttttgttgaaacaagtaatcaaaaactttatcgctagccttgatcttggataccttaacaatttctttagcaggtaaatgctctgcaccaattattttaacagtactgatattcgctaaaggtgaaatatagtatcctaaaccagctatcgccaaaactgaaaccgtcattatcagacctagcctacgtcgtaatgatcgtcgtctttctgcctgtaaatttgagagtgaggcagaaatcttggtctgcgattttcgactattcctttgttggttaaattcatgattcaagtacggagacaattctttccttggatcaatcttagttactggctttttggccatctgcctcacctacctcctagcgtgaaatttcttccatcaccttaatcacttgatcagatgcatcaggtacgcctaaagccttagaagctttgctcatttcagtagcatacttttcatcgagcaaaatatggtcaattgaagagacaaaattatttggatttaaatcatcttctggaataaccaatgctgcaccagctttttctaaatcaagcgcattcttcatttgatgattatgagttacattagggcttggaatcaaaataacgggtacacctaatgcagtaaattctgcaatacttgttgcaccagatcttgaaacaacacaagtcatttctggcaatagacctggcatgtttttaatgtatggcaaaactttaatattattaccaatatcaacattcttaattttttcttgtaccttatcaaaataaaaagtacctgttgcccaaataatttgatatggtttttgctttagcatcattaatgacttaagcataattctgttaattgctaatgctccacgggatccaccaaatactaaaacagttggcatttttggatttaatccccatgttttttcaagatcaattttttcttcgtgcaagcttaaaacttgttgtgaccgtggattacctgtcttaactagtttcttcttttctgagaattcctttgcagcatcatcaaatgtataacaaattttatccacataatgacccaaaaatttattagctaatccaaccactgaattagattcatgaatcattgttggaatatgcattttagctgcttcataaaccatagcaccgctaacgtaaccacctgtacctaaaatgacatctggtttaaagtcccgtaaaatttggcgtgcgcttttagtagcttgtaaaaatagcttgatagtctcaaagttttttaacggatgtttacggttaaagccttgaatcttaattgttttaaagttaacaccggctgctggaacaatttttgattccaatcctttttgtgtacctacaaataagatttcatcgtttttactaataccgcgttctttcaaacgttcaataattgccataattgggtaaatgtgaccgcctgtaccgccacctgtaaaaataactctcattttatttagtctttaattcctcaacaaatctaacaaagtaatcgccacgttcttcaaatgttctaaattgatcccaagaagcacatgctggtgagaacaatagtacatcgcctggttcaactaattcccaagcacgaggaacggcctcttgtagtgtattaacaattacaatgtccttaattcctgcttttctagctgcgtcagctaacaaatatctagtttcaccataaagaacaattgacttaacatgttttttaaataatggtaccaaatcatcaaaagtgaagccacggtctaacccaccagcaatcaatacttccggttgcttaaatgatggaatagctacagttgctgcttcaatattagttgacttagaatcattataaaccttgcagccatcaagtgttgttacatattgcaaacgatgcttagcgccagtaaaggtgctcaatactgcggcgatatcatcattatcagcgcccataattttagaaattgcaatagcgactaaactattttgcaaattatgaatacctggtaatttaatatcagaaatcttcataatcttttcgttttgactttcaagatattcatcgccaatgaaataatcagcattatgatctgtctcagaaaaagtttgcattttagctggtgaaacttctttttccttagccaaaatatctttttgatcataattagcaataaagtaatcattactgttttgcgttctagttacattcaactttgcattgacataattttcaaaagtcttgtgataatctaagtggacgttgttgtaaatatcaacgatcgctgcaactttaggatcaatatcagttacacccaaaagctggaaactagaaatttcaactactaaaatatcatccttagttgccttaggtacaacttcagaaatcggtacgccaatattaccaactgcataagcatgatgaccagatttttgcaaatgatggtccaaaattctttgtgtcagcattaccgtagtagtttttccatttgaaccagtcacacaaacatagggagcatcactacaacttaaggcaacttctggttcagtaataatcgggatattcaactcctcagctttttgaaccatcggattttcatagggaatacctggatttttaactaaataatcaaaatgttctttttcaagcaaatcaactggatgatgaccgccaattacgcgcacgccgcgacttttcaattcttgtgccttagcatttttctccaaatcagctttatcatttaaagttaaatttgctcctaattgcaaaaggagttcgctaacagcaaaaccacttttacccaagcctagaaccaaaatgtttttattattataagttttaatatccttcattttatgattatccccaaattactaaatacaaaatactgccaattaatccaactaaccagaagacaatatctactttccattctgaccaacccaacatttcaaagtggtgatggataggtgtcatcttaaaaatacgcttacccgtagtttggaaagaaattacttgtaaaattacactagcagtttcacaaacaaaaacaatcccaactaacaataatgaccagggacggttaagcataatactgattgttgctaaaccgccacctaaagcaagtgagccagcatcacccatgaaaattttagccggcttatggttaaaaataaagaaggcaattaaaccaccaattacactcatacaaaaggccaaaacagcaaaattcttttgtttgaatgcgatataggcatatgtaccatatgctacaactgataaacctgttgctaaaccatcaagaccatcggacaagttaacagcatttgaaaaaccaaccagccaaaaaataataaatgccacaaataaaactaagctatggacaaccccagcaaaaggaatatataacccaaattgaaaatgatcacttgtagcaatcaagacaattaaaattgcaattataatctgtaatgctaatttttgccatgcacgcaagcctaaattacgtttgaagtaaagcttaataccatcatcaaggaaaccgataataccgtagcctaagagactgattaccaaaatccaaacaactttattcaagctgtgctgcatagcagctacccaaataacagaaataactgctgcaattacaaaaacggtcccacccattgtaggtgtgccagactttttttgatgccatttaggaccttcatcacgaatttcttgtccttcgtgatgtgaccgcataaatttaatcaacaatggaataaagatcactgtcaaaaccagtgaactaactagggcaatacaacttgccaacatcatattcattctgagttactcctttaacttaatgtttaattttcttccagcttttaattctgttcctttagccacgctttgactcgcaacagtgccggtaccttttatgcttaacttaatatctgtcaaactagcaaattggtgtaaatcactataagtccatcccgtcatatcaggacaaatgatttttcctgaagtattgacaaaaatcttagacccagactctaacttttcgccactcttaactccttgattgctaatccgatcaccgctaccaattttaaccaaattaagtcctaattgcttagtttgactttcagcttgtgcaacggttttagcttttaagtttggtacttttacagtagttgatacatcatcatttttagcaatcgaaatgattctctgcatcatcggtttgaaaattgaagccaaaatcttttcagctccgcctccaattaagtgtggttgcttaattgtcaaataaatacagtaacgtggtttacttgctggataaataccaacaacagagaaaatataattactatcaccctttagataacctccacctttagggttagcaatctgcgcagtccccgtcttaacagcaatatcggcgtttcccatcttataagcagaaccagttcctgattgcttattaagtacctttctcatgttagccacaattacttttctggttttagcactatatactggagtaccaacttttttaatctgatagccttgaattgtattgccatcagagtcagtaattttattaaccaactgtggctttaccatttgaccattattagccaaagaactataagcttgcatcatttgcattacattcacagtaacgccttgaccaaaagcagtaattgcttggtcaactggtgttttaaacgaaatcatccccggctgctcacctggaagactgactcccgtcttttcaccaattctgaacttcctcaagtacttcttccaagtcttagcacccatcttttgttctaacttaacaaaaccagtgttacttgaacgttcaaaagcttgagaaaatggaattgtgccccaacctgaagtcagccagtcatggatagtcgaaccagcaatattaacagaaccagaccggtaatactcattagggttgtaattgccactgttgactactgcagcgaatgacaaaatcttgaaaactgatcctggttcataagtatcttggaccaagatatcccgatacgacttagttaatcccttcatagtttgaggattaaaagtagggcgttgagaagttgccaaaattttcccagtcttcatgtcttcaactgtagcagtaattgatgttggtcggtaagttttctgtacttcacttaagcgagtctcaagcaaactctgcaactgagaatctagtgttaaatacaagttgtttccatttttagcaggcttataaacctgattactatttggaagctgatattcagatgcatctaccgaagaaatccggtaaccatctgtcccagtcaaagtcttattgaaataggcttcaattcccatagttccgactaagttttgtgcattagtctttttattccaaattggttgagccaatccaacagtatgtgatgcaaaaacaccattgggatacaatctagatggtgtttccaagaacttaattcctggtaatttcattgcttcaatctttttcttttgccgcaatgtcagtccactaccacctgtcccaaattgtacctgaaagaccttctttttgggggttaaatattggtaaattttttccgcagacaatggtaaaacctgtgccagcttttcagctgtcttggttttattcactacatactcaggtttattcttatagttgatcgaagtcttatctaaaatcgcataaaccgtatacaaatgcgaatcttccgcaattgttaatccatttcgatcatagatagtccctcgcgtggccttaattacctgattgcgcttataaagctgcttggtacgctgtgataaattttgaccattaactgtcttggatattccgatatataaaaatctagccgtaaatacaagaaaaaccaaagccacggccatttggagaaatctccccaccgtaaagcggtagccgtgggctttggatttttgtaattttaaattactgttttttttcattaacgaatcgtcctaatatttttgttaattagagttaatcctttttcacgtgcaattttatttaaacgtgaagtagaggtcaactccccaatctcttgacgtaaatcggtaatcttattctgttccttagcaactgtttgttgagttctagtcaattcatgttgagccgaagttgcagaaatactagaagaaactagaaagatcatcatgcccaacgtaatgacgcttccaataatcatcaaagctttttctatgccactataaggaactttacgcggatcaaggataattcgttgtcgtctttgcgaaccatttctactacttggttcatattcaatttttcttgctgagctatcagccataacattttcctctttataacttctctgcaacccgtagttttgcactgtgtgagcggttgttgttctctaactcagaagtagaggctacaattggtttgtgatttaccaaacgtagcgttggcttcataccgtccggtataaatggcattcctcttggcacctcaacttctgaatacttcttaaaaatccttttaacgatcttgtcttcatgagactgaaacgtaattacactgattcgaccacctggacgcaatatcttaattgcttcctctagcgaagcttgtaaaacatcaagttcgtgattaacagcgacccgcaaagcttgaaaactcttctttgccgggtgccctccagtccttcgtgcatacgcaggaatcgcatctttaatcacatcaactaattcaaaagttgttgcaattggcttttcccgtcgtctttctacgattctgtgagcaatttgacgagaaaacttttcatcgccatattgatacaaaatatctgccagttctttttgacttaaagtattaactaactgataagcatctaagtcctgactttgatccatcctcatatctaatcgcgcatcataacgatatgaaaaaccgcgatctgcttgatcaaattgaggggaagatacacctaggtcatagtaaatgccatctattccatctgagtaacccagttttaccaggtccttttccagattactaaagttgtcatgtaccaattctaaccttggctcactatccagttgtaataaattcgcaaagttcaacttcgccgattttatcgcatattcatcttggtcaaaacctacaagcgtaccggtgtcaattttgctgagcaaatatttagcatgtccaccaccgccaaaagttgcatctacataaagaccaccgttttttggtttcaaattgtcgatagtttcgtgtaagagtacactggtgtgtttgaatttcatattttttatagttcaatgtcgtccaaattttcagcaatatcatcatagtcttcgttagcttcttcttcaaaactagtccaacgttcttttgaccaaatttcaattcgatcagagacaccaatgatgacacattctttaatgagtttggcatgcattttcaacgttgttgtcagattaacgcgaccttgcttatcaaactcacattccatcgcaccagagtagaataaacgcataaatttacgtgtattcctcttagtcaacggaagttttgctaatttagcttcaatcttcgaccactcctccatcgagtagccaaaaatgcagccttccattcctcgcgtgaatatcatcttgtcgccaatctgatcgcgaagtttcgctggtataatcaggcgacccttgctatcaagattgtggtgatattcacccatgaacatggtctagcccccttccactaaataatttaccacaattccccactctctaccacattcataagaaaaaaatacagatttttaaatttcttttttattgtgatttttcaaaataaaaaaaagtcacaaaatattgaaattttgcgacttaagcatatacaagtaattttattttataacactagcatcaataaaagtccgatataccagaaaacagtacaggcagtcaaataatcccataattttctaactgtttttcctaaagaaatatttttatttctaatcgcatcgttcagcgacacaacaatcactaatacaaaatagcataaaaaaccataaggtaaaaaagaaggtttattcatatgtaaagtaattaatccacaagctgaaagaaagaaaaatggcataacatcgtaccctctaaactgtgctttagggaaaattttattgataaaaaaagcaactactaagccaataattggaattaggaaaatataaagcataagtattcctccattctttttattctaaactataattgatttgaaaaaaaccgttaataagcataaaatattgttcaaataggagggctgtttatggcacgaaaaaagaaaaagaaatcaggttttcaaaaattaactattgcaatggcttggatcatggcaattattactttagcagctgttattgctcaagctgctatctcacttcaaagtttttaaggattaaaaagacgcgaaagaaaaaatcttccgcgtcttttttaaactcgataagcgtttaaatcaattaagaatggataatcctgagctaaattgccccaaatccaatacaagagaaaaaagaagacaactgcccaacctaaactgactaaaatgctcattaataatacgtgtgctgatgcagcactaatacccaccatattaaaaatgagccaactatacgcaacaaaaactgcagttcctaataaaacgacaattaatctagcccataacatttccggtaaaaaacgagctgttttttgacagatccagcaacttgcaggtaggaaaactgtataaacaccgataatgccataaaaatagatatcagcaacaattcctgcacctaatgctaaccaaatttcattatcattagtatcatcaaacagaccaatcaacattacactgattggcaaaatgacgcttgacgctgcaaagttgtcataagtcataaactgatgtaagtaaagtgcacatacaccgtctactaccaatgcaataaataagccaattgccaaaacccattttcgaaacgtagacattaattagccacctgtctttcaattacagttacaacagatggatcactaatatcacctgctggtttaattctaatctgatcagatagaccaaatgaatcacgagttgtcgtagtaactgtaccaattaacaagccttttggtgagttaccgcccataccactagtatatactctcgtgccggccttcagtttgcgaccatcaaccacctgtgtaaaggcaagataattattggaagtaactgtaataataccatgtactgtttttccattcgcagcatccgcttgaacagagaagcgattagccgactcatcagtagtagtaagtaattcaaccttggaagaagcagcatttgcttctacaattcgaccaataacaccgccatcgcacatgacagccatattctttttaattccagctgaacttcctttattaatcactaataaatctgaccatgtatcaggcgaccgagaaataacagaggcgttgaccatggtatagccacttaacgtatcttttaatttcaatgcagacttcaattgcctattttctttttcaagagctgaattgcgagccttcgtctggcctaaattagtaacttctcgctttagatgattgttttcttcttgcgtatttaaaatatcatgaacactatttaatccgcctgacacgagccctactggtacatcaacaattctagtacctaaagcaacgacatcgttacccaagctttgaatcagtaaaggtgtattgcgcctattgcgcaagctaacactcccacccaaaacggataaaataacaactactataataaatgctgataataactttttattttgcagaaattttttcattaagaattgatcctatagaaaaaccggcaacagccggcttttttattatttgcgacttctacgcattacttcaatattcttgagtgattcaccagtaccaattgctacacaatcaagtggatcttgagcaataaacacaggaaccttagttgcttcagaaataacttctggcaaattcttcaagagtgcaccaccaccggttaaaacaataccatgatcaataacatcggcagcaatttctggtgaagtttgttccaaagtctccttaatagctacgataatgtcttgaactacatcttgaatagccttggcaacatcaactgcttcaatatcaacagattttggtaaaccagttactaaatcacgaccacgaatattcattgattcaatttctttagccttttcaactgaagctgaaccaatttgaattttaatgtcttctgcagttctttcaccgattaataagttaaagtttgagtgaacatagttaacaatcgcattattaaacttatcaccggcttgacgaattgaagttgatgaaacgattccacctaatgaaattgtagcaacatcagtagtaccaccaccgatatcaacaaccattgaaccagtagggtccataactggaagaccagcaccgattgcagctgcaaatggttcttcaattacaaatgcttcacgagcacctgcaactctagctgcatcaattacggcacgcttttcaacttcagtaacacctgaaggaacacataccattactgaaggcttggaattaccaacagtcttttccataaaatatttaagcattgctgcagtagtatcgtaatcagcgattacaccgtccttcattggacgaatagctacaatgctgcctggtgttctaccaatcatttcttttgcttctgaaccaacggcgattacttcgcctgtttgtgtattctttgctactactgaaggttctctaagaacaatgcccttaccttccatataaacaagtgtattggctgtacctaaatcgataccaatattctttgtacctaatccaaacacaaaaatctctccttaactgttgcggtctctaaatcttgactaattatagcatactataactttaaaggcgcctttcacacaaattttaaagaactttaaaacaatttttctcacgcaaacttaaatattgaccttctcccacgataaaatggtctaagaaatcaattttcatcatttttgcagcttgacgtaaactttcagttaattccaagtcacttgcagatggcgttaatttaccactaggatgattatgagcaataaaaattccagagcagccataaataactgcccaccgaaaaatttcccgcggatgagcaattgatctattcaaagtcccttgaaatagtttcttctcagcaataatgtggttgctattgtcaatatacaatgcccacaattcttcctgcttgtgtcctatcagcttatcagctaaatacgtacctacttcaatgctagatgtcaaaattgtctttctcttaggtgaagcgcagcgcaaacgatctagtactgcctcagccgtaatagcaagttcatccgagcattctgaactggtaataaactttaatagatcattaaacgaatttaaccctgtgtttttcagaaaaacatttaagtcctgcaacgtatgaattcctttattttctagttgttcaaataattgtgtcaatagctctaaatctgttttgacaaagtaatgatttggttttctttttaacataaaatccccctcattacttattacgcaaaaaagagctaaatttttttcagaaattcaaaaaagttttgacaaatcatcgttgcattctgcttatctttaacagatggtgctttcaaatctggtaccatcacacattttaaccctgcattagcagctgcttgaacaccggttgatgaatcttcaaaaactaaaatattttctttaggtaaattcattttcttagctgcttctagataaatatctggtgccggcttagccttaatgtgacctctttgtacatcaagataactaagatgaaaatcaaaataatttctgattccagtcacccacatagcatgctgaactacattttcataattacttgaagcaatcgccatcttcaagccacgcttttcaaattcgtctaatgcttcttgaacaccaggttgcagctttaactttccctcatcagtccattgccacaccaagtcatcagttcgcttaataaaacgatcacggtctgcttcagttttaaaatatttatgataaaaatcctgcatctctttaactgtagcaccagttaacttgagataagcatcccgcggcgtgcccaaattctcttcttctgccgcctgaatattagcatcccaatacagcttctctgaattaactagcaaaccgtccatatcaaagataatgccttgaatatcatcatctagcccttgtacgcgcatcacgttttcctttccaatttaaaatagcactaaccaaataaaaggatccactaacaattaaaatatcattagctcccaagtgatctcgcagctgggtaaaagcagctcgataatctttttcataattatatcttttttgtacatcaattggaaaatcatcttttttagctactcgcggataagataaagttgtcagtaaaacttcatctttatcatcaaacaagctaaacacctgctcaagatccttatctttcatcatagtcactaaagcataaagcttgccatgcttttgctgggtcatacgatgaacgactgccagcaaattactcattgcctgaatattatgtgctccatctaaaatgattagcggattttctcgtaaaatttgatagcgccctggaataatcgtttgattaatcgctgtttcaacttcttcatttgataaaggcagtttcaacaaaaagaacgcctggcaggcaacggcaatatcataggcttcaacttgtggtcgtaaagcaaaaactagctttcttttgtgatcttgataaacaatttgattatcaagcaaaacactaaagtctcgtcctaattgataaactatcgcatgttcttcttcggctttacttttcaaaattggccaaacaacttctggcacgttacctaaaactactggtctttttgccttaataatgccgcttttctcacgtgcaatatcctgaattgtaggtccaataattttttcatgatcgagaccaattgtagtaataacacttacttctggcataattacattagtcttgtcatgttctccaccaattcctacctcgataacagcataatcacactttttttgagcaaaatagacgaaagccagtgcgacttcatattcaaaggttactaacgaaaaagttgagtcctgctgctgcaatttctcataagtaccctgcacaatattagctgttttaactaaatcctgatcactaatattttgattatttaactgtattctctcattaaattcatagacatacggtgagacaaaaaggccagtcttttgaccagccttttttagtaggtttgataaatagtatgaagttgaacctttaccattagtgcccgtaatgtgaatcgttttaactagatcttgaggattgcctaattccaacaataaccgcttaataaaagacaaattatttttaggatgtaaatgaggcaaagcatataagtaatcgattacttcttgagctttagtaaatttcaattatttactctctttcaaatcttgaattctttcacgaacaccggctaattgactttcgtagtcagccttcttttccttttccttgttgacaacagcttctggagcgtgaccaacaaagcctttgttagccagcttcttttcacaacgagcaacttcgtcttcaagacgcttttcttctttttccatcttttctagctcatcgtcaacattaacaagttcagttaatggaacaaaaatttgtgcgcctggaattacagcagtcttagctaattttggtgcttcaacttcactagctacagtcaattcctttggatgtaagaagttttcaacgtaatcagcattttcgtccaaaacgcgcttgttagcttcatcgtctaattgaatcatgatgtcgatttgacttgacattggtgcattaacttccatgcggatgttacgtactgctttaatagtttcaattaagaaggccatgtcttgatctgcttgcttgttttcaaattccttgtgagtagttggatattcagcaaccataactgacttaccttcatgtggcattgaaagccataatttttcagttacaaatggcataattgggtgaagcaaacgcaagatttggtcaagaatccaaattaagttttcttgctttcttgcctttaattcttcatcgtcaccattcaaagcaaccttagaaatttcaatataccagtcacagaagtcattccaaataaagttgtaagcttcacgaccagcttcaccgaattgatattcatcaaacaagcgagttacttcactaacagtatgattcaagcgatcgaaaatccaacgatctgataaatcaaatttagaagcatctggcatatgagctggtttagcatctgctggcaagttcatgattacaaaacgacttgcattccaaatcttgttaatgaagttccaagcagcagataatttcttaggatcataacgagtatcttgaccaggagcagtaccattaagcaagaaccaacgaagggcgtcggcaccgtatttatcaactacatccattgggtcaacaccgttaccaagtgatttactcatcttgcgaccttgttcatcacgcattaaaccgtgtaaaacaacatcattaaatggacgcttgccagtaaagtgcaaactttggaacatcattcttgatacccagaagaagataatatcgtaaccagttaccaaggcattagttgggaagtagcgcttaaagtcttccgcattagtatcaggccaacctaaagttgaaaatggccataatgcacttgagaaccaagtgtcaagtacgtctggatcttgttcccagttttcaatgtccttaggtgtttcttcacctacataagtttcaccagttttcttattgtaccaagctggaattcggtgcccccaccacaattgacgtgaaatacaccagtcgtgaacatcttccatccagtgatcaagagtttgttcaaatcgttctggaacaaagtttactttgccatcagtcttttgattttccaaaactttgtcagcaagtggcttcatcttaacaaaccattgcttagaaagacgtggttcaacttgaacgccagaacgttctgagtgacctactgagtgaacaattggttctatcttaatcaagtaaccttcttctttaagatccttaactaaggcttcacggcattcaaaacgatccataccagcatacttgccagcttcttcgttcatcgtaccatcatcgttcataacattgattctttcaagattatgacggttaccgacttggaagtcgttagggtcgtgagctggagtaatcttaactaaaccagttccgaattctggatcaacgtgttggtcttcgataattggaatgtgacgaccaacaagtggcaagatcaattctttgccaacaatatccttgtagcgcttatcaccaggtgctaccgcaacggcagtatcaccaaacatcgtttcaggacgagtagtagcaatttctacataacctgaaccatctgcaaatggatacttaatatggtaaaaggcacccttatcatctttgtgaataacttcgatatcacttaaagcggtttgaagtgctggatcccagttgatgatgtattcaccacgataaattaagccttcattgtaaagctgaacaaaaacctttttaacagctttagaaagacccttgtctaaagtaaatctctctcttgaataatcaagtgaaagccccatcttagcccattgacctttgatgattgatgcgtattcatctttccaatcccaaacctgtttaacaaaagcttcacgtcccatttggtgacggtctttgccttgtttacgcaattttgcttcgaccttagcttgggtagcaataccagcatggtccataccaggaaggtaaagagtatcatagccttgcatccgcttaaaacgaattaaagtatcttgaattgcagtatcccaagcgtgacccaagtgcaacttaccagttacatttggtggtggaataacaattgaatatgggtgagcttttttgttacctgatggcttaaataaatcttcatcaagccaggtttgatatctacctttttcaacctcgtttgggttgtatttaggtgctaaatctgtcataaaattcctccaataaaaaagtcctagacatattgtctaggacgatcagttaaaccgcggtaccacctacgttaagcatgtatcaaacatgcttctcttgaagacgataacggcgtataccggattaacctactttttattttcaattaatcagctaatcaagctactagtcaaccttcggcctctcagctgtctggcttttctctgttaataaagtcgacccctcttgattcttgctttggttatgattatagcatgaacttcactcagaaaaaagggttaggaattagtcgtaattaagttagccatatgtctttattcttttaataaatcagcaatacatttttccgatgaatgatattgcttatattgttttaacacgttgattaaatcatcatagtgactattccaaaaataataattttcatcataagatttcacactcttaagatcgttataatactgcttaacaaaatcactaggcttcactttacttttatagttatttgtatatcgctgatagtcttgatgataaagaatgtctagaatttcaatctcaggtctagtacgaagttctactacttcggatactttctttttatacacttctggaagattaaacttttcggttttggaatcaagtatcctataaattttaacctttctacttctaaaccctttattcaaaaattctttagcaaactttttagcatttcgtgctctaattacttcaccttcaagaagatcatcctcgttgaattttagtgcatcgtgttccaatagaacttccataattgctcgttcagtatgaccttctacaataatagcgattagatctgtagagttactcatccattttaaccgccttttctgtagccttctttaaagccatgtaggcatcataatctggagctgtcccacctaaataatctgattcaaaaacatcggctttatttagatcgcttcttacatcagcagttgaatatctttgaagctgaatcttgccttctctcttagtaatatattcttcatcagttctttcaattttatccaaaatttcagtatagtgcgtactaaataccaaagtagctctatttatgttgattttaggattagtaaaatactcaataaaagaatctacaatagcgtgattaaagtgattctccaactcatcaataaagatgatgccaccaacggaaagtgcattaattacctcgccataaagagttatccctttagctgtaccagaagacaagtattttgcaatcgttgtaaaatcattttctgcaatctctgtatctttccctttaaacttcagcttaaacaattgtttagtagcaccagagccctcaggcttgttttcaattttaagatattcaattgttggatctaaaaagtttaaaatttctccaggcacattgccagaaccatacatcaatgcattaaagtcagtaaagaacaaagtatcaaatggtatttgaggataatacttatttttcgaaataatcgctctaaaaatcgaatcatcagacgacaaaattgaagaagctaggtcgcctaattcttttctgtctaattctggttttatatttttgaaatcaaataattttttctttgaaagattaacagttaccttttttcgatataccgtttcagactcaatatgccagcttttacttaaagttttctttaacttgaaaactaaactatccttataaactacatgatcagttccataaaaataagttgtaacactaataggctcatttcctattagcacatccgttagcttagtttgatcaattgacttttccatcacaactgtttgaagaattcctatcaagagtttcatgatcgtagtctttccagtagcattagtccctactagagtgattaaattattcacccataaactgccgagcaaatgagttaatcgatcagaggtattagaagtaacccttgcatcactgaccagtgaaaattcaagatcatcctcaaatagcggatgattttgaatttctaattttaaaaagtataatttatttttattcataattattcacctaaaattgttttattcaggctaaattttatcatatttttgcattttatacataaaatctgtttaaaatataaataatcctcatcaagtagttactacttcatgaggattatctaaaatattctactttctaatcatcttaactgcttgaatcaaaatcgttggaatcagagccaagccagcaagccacattacttcttgcccagttaacggagtaactgcaaacaagctatgtaacgccggtacaaacaaaatcaaggctaacaaaattgttccgacagcaaatgctgctaaactgtaccagttatttttgaaaccgatcttgaagatactgtgttgtgaacgacaattgaagccatgtaaaagccgagcaaatgtcaatgttgagaacgccatcgtcgttgcaactgcaggactatcttttagtccgatcaaaaaggcagcaattacactaatcgaaatcaacaaaccttgaatagtaatttgactcacaaaggctttgtccaaaataccagccttaggatcacgtggcttacgtttcaaaatatctggatcacctggctccattccaattgctaaagctggaagcgaatcagttaccaagttaataaagagcaattgaaccgctacaaatggtactggtaagccagcgagtgaagcaaataaaacagtgataattgctgaaaggttacctgataacaagtagccaatagcgtttttaatattttcataaactgttctaccgttagcaacagctttgataattgtggcaaaattatcatcggccaaaatcatgctggcagcatctttagatacttcagtaccagtaatccccatcgcgacaccaacatcggccttcttcaaggctggtgcatcgttaacaccgtcaccgatcattgatacgatacgatcttttctctgccatgcattaacaattctgatcttgttttcaggcgatacacgagcataaaccgaaatcttctcaatgttttgatcaagttcttcatcgctcaaagcatctaattcaaggccagttaaagccatgtcaccttcattgaaaataccaattttcttagcaattgcaacggcagtcaccttatggtcaccagtaatcatcacagtcctaatcccggcttccttagcacgagcaactgcagctacactttcttcacgtggtggatccatttctgaaacaaggccaataaaagttaagccatcttctgcttcagtagaaagctcttcatcactttctttataagcaaaagccaaaacacgcaaaccattttctgaaaagtaattgttttgtgccaaaatttctttacgatcttcttcagtcattggacgaatttcatcgccgaaacgaatattgacacagcgtttcaagagcacatcaattgcacctttaacaaaaatagttggtacagtatgaatcaaatgcttagtactcatcagcttacgatctgagtcaaatggtacttcttccagacgcttagaatgttcgcgtaattcttgttctgataagcctaaaacaccattacctaagtcaattccgggcacttgacgatacatttccagcaaggctgactcagtcggatcaccaattgccttatcttcggccaaacttgcatcgttgttaagcactacatcataaagcaagtagcggtgaagttgattactcaaatccagctcatttggctttaaaactttaccaccaatatagatgtcctcaacagtcatcttattttgagttaacgtaccagtcttatctgaacaaattactgatacagaccctaaagattctacggctgccaagtttttaataatagcattttctttagccattttttgcgtacccattgcttgcacaatagttacgatagaactcaaagcttcaggaattgcagcaacagctaaagctactgcaaatagcagtgaatcaagcagcggttgaccacgccacatttgaataccaaagatcacagcacacaagattaaaatagcagtagccaatcgtgatgaaaactggtcaagtgatacttgcagcggagtgcgacgttccttagtttcattcatcaaggaagcaatcttaccaatttcagtctgcatccccgttgccgttaccacaaccgtagcacgcccataagttactaaggaactggagtaaaccatgttaacccgatcagctagcggcacttctttttcaaaatcagtgtccaacttgtcaacattagtcgattcaccagttaatgaactttcgttgacttgcagagaataattttctaaaattcgaccatctgcagtaactaagtcacctgcttctaacaaaagaatgtcgccaggtaccaagtccttggcctcaatctccattttttggccattacgcaaaactttagccgttggcgcagataatgactttagcgattctagcgacttttccgccttaacatgttgtaccgtacccaaaatcgcattcagaatcaatacaacaataattaccaacgtactttccagactgcccgtaaaagcagaaattattgccgcgataattaggatgatcaccattaagtctttaaattgttctaaaaagacctgaaaagtaattttcttctttccttcaactaaagcatttggaccaacttgagctaatttctcttgagcctctttagcgctcagcccctgctttaaatcggtatttaactctttagctatctcgtcttttttctgacgatagtattccatgtaaagccctccctaaacataagagtaatttaagcaaaaaaatagagactactggctaaaacactgtttagtcaatagtctcatcatttaaacttacagcggaaaataaatttcgttctgacgccgtaaatacaatttatgccgattactccctatttacttgtacataattaaaccatatcaagtaggtagttggcaagctattttaactttcttttaggaagttttctaattgttcatcggtaaaatcagaaccgtaattttgttcaaggagatgcatgatctcttgcttggtattaccagttcttttaagtgaagaaactaaaattttgacgcctcgtttaagtccctcttctttaccttcctcacgtgcgtcttgttctcgctccagtattttctcttcgtagtccatgatataatcactccattccgagcaataagataatcatttgtacttcttatctttcaataatccgttagcaatatcagccgaactaactggtacaccgactaaacgctcatttttccacaaatcaaaaaaatcagctggcatcatttgatcaaattcatcatctgaattcattaaatccttataaacacgtgacttctcaaataaatttagagcctgcttaggataaatgtttaatctcttagcaattaagtcgctaattgcttcagctagttgctgatgaaattgcttttcactaatttcgggaatcatctaaccaactccttatctatgaacgttaaagctttgagagctctttctgtcttgaaacaatactgctccgaataaacactcggttttaattttagcagagcctcatctaaatctagattaccatgtttccagcaattaacaacagaaaaaagtttaccatctgctgttgggccaatgacgatatcagaattatcttttatattattcattctattttgaatgacaaacttaatccaatcaatatctgcttggtaaactaatattttcaagtcgggttgatcagcatcgaatacatatctatttaatgtcggttgacctgaatatctagccttacgctttgcccatttttctgcttgtctacgattagcagtcacataaaagccattaccaaaatcagttgtaaaaacatttttatttatacgaggctgataaacagcctgattgcttccatgatacaaaatgactttggtattgcttttcatgaatcgtgatgtatgcgtatttttcatcgcgcacctctttcataaatagtaggacaaaattatcctccactatttattacgcaaaaaagcacgatttttttgtgagaaattaaaataaaaaaagaaaatgcctgagaattatatcccagacattcaccaatttacggctctttctcatttctcttccttcacaatataaattggtcgttctttaacttgtaaatagattttaccaatataacggccaataattccgatacacaaaagctgcaaaccgccaatcaataaaataattgaaattgtgctggcccagcccaaaatacttgaaccaggaactattagtttacgaacaattacaaaaataagaccaataattgacaaaatgaatgaagttatcccaatccaaacagctaagttaagcggtgcttgagaaaaatcagcaatcccgcccaacgcatatttgaataatttgtgagtcgtccaatcagtttcaccagctacgcgctcgacattgtggtactcaagatacttagtcttaaaaccaacccaagcaaaaatacctttagaaaagcggctgtattctttcattgataaaactgcgttaaccatctgcctggtcatcatgcgatagtcgcgtacgcctgaaacaatttccactttagaaatgcgattaatcaccttataaaattgattgctcaagaaagacttaaacttaccttcccctttacgatctactcgtctgcagccaactgcatcatagtcaccagtctgcaaaattttatacatttttggtaaaagtgaaggcggatcttgcaaatctacatccattaagacaatataatctcccgttgcagctgataggcccgcatagatagcggattccttaccaaagttacgagaaaaagaaatatagtgaacatgtttgtcctgctcatgcaattttttcaattcggtcagtgtgttatcattggagccatcatctacaaaccaatattcgggcgtcactttgggcattttagctaatactttttgcactgctggataaaaaagtggaattgtttcttgttcattaaaacaaggaaccacaattgataatttttccattagatttcttctttcttagcttttctaaaagtaactactttattaattacaaattgaattaaagttgctacaaaagttgctactattttaacgattaagtgcggataacccaatttagtaacgaaaataaatagggaaaccgtagtaaataccgtggtaatctgaccaacgataaaataagaaataaatcttaatatcatgcgatcatgaactttaaagttagtataagaattccataaaaagttattgatgatcccgcaggtagacgaaataatgttagctatttcaacattcatcttgaaatgcgtcaaaattgtataaattccaaaatcaacgactagccctaatacgccaattagaacatactttactaattgaacaaaatcttctgaatagattgctgttttgattttttccataattattcctaataaaaaatccagacaagaggtcctggatttcaacatatttaactaatatggtcttaattatatcattgtttttaagctctacgttttcattattaaagttaaaactttaataggaacaccttttgcattaattataatttttgtcattcaatctatctgtcttgttagtatcctcatacaaatgataggaactcttaatcttatgcctgccttgtggatcaaacatgcagagaaagataacatagcaacactttaaattttgatatgtgctgcatttcaaaatcatacagatttccatcaacatcctcaaccaaaatatcgagaataacagctttttgcttagggtgtttgggatcagcgacctttctctgcttctgcagataatgaatatctctaatctcaatctccggcaccagtccctgtaggacatgcttgcaaaaattcttgttagacataatctcaccaaagattacatcctctgtgaagccaaaccagggcttctttttcttgtgcgtattttccattgcgcacctctttcataaatagtaggacagaattatcttccactatttattacgcaaaaaagtgcaatttttttgtgagaaattgaagttttttaaagttttacccaactatatcttccaacttcaattccagatattctccccgctttaagttagcaggcaagcttaactttcccatcgaaattcgctctagctcaacgactttcatccctaccgcaccaaacatacgcttgatctggtgatatttaccttcacaaattttaatttcagttgtagacctatcgtgctcttcatcctgggataatatcttcaattctgctggctgcagtttggtcccatcgcctagtgtcattcctgaagcaaaagttttaacagttgcatcattagctacaccagcaatttcagcacgataaactttatcaacatgcttaccaggtgcaagcaattcatgattcaactgaccatcattcgtcaaaaggagcaagccagtagtatccttgtccaaacggccaactggcacgattccttgataacggtcctgcggtgcaagcaaggaaatcaccgttggctgattgcgatcttccgtcgctgacaaaacacctttaggtttattcaataagaaataatgatatttttgataagcaacagcatctccgttaacggtaacctgatcgctttctttaacttgctgctttggcgttttaacaatcacatcattaaccgcaacaattccttttttaattaattggtgtacttcttttcgtgagccaacattcatattggccaaatatttatctatgcgcattatgtctttctttcgttcttatgtgttgattaatattaattatataagaaagttaacccaatttcgaattgcgacactaatcaaaaacggtcgattttgttttcgaccgtttttacgcgcgttttgcgcgcgattatttgcttaaaatatattttgtagctctgccttcacccattcttctaatataaccttgtttttctagttgccgcaaaatcttcaaaactttcgtcctaccaaacttactcatttggctaatttgcttcgtagtatccgcaccttcatgaattatttgatatactttcttttcatcattagacagatcgtccgtaataaattttaaaactggcaatattatctttatcgaattatcaaaaatttcaaactgcggttgaaccaaactacttctataagaatcatttattcttcttacacctgtaccaaattgctcaattaatcctaacctaaagaaaacattagcaataattggattacgcaaaatggaaatctgacctgaaagatattcttctttgctaagtccttgtggcaatccacctggagatactacttcaattctgtcatcatacatagaaattttaatttgcgaattaatgttccaaactcgatgaactaaggcattggctattgcctcacgaaaagcttcttctggaatctgacttacaatatttcgcgttgctccctgtatttcttcatgttgataatattgacgatatttttgaattgcttgcttatactctttaagaatagattcatgctcataacttgctcgatcaagcataatattaatgctttcaccaaaccgaacaatatcaattccacgataattatttttgtctgccaaaagctcaccggcattagtgtaactagtatccttacgctctaaattaagcgtaatcaatatatcagatgttaaacttttaattcctatcttttcttttaatgcttcttctaaaatgttaaatgacaaattttggttcatcgcggttaaactatcataggttctattttcaccaattaagattaactgtgataattcagatcggtccacttcgatcgaagcactgtcattactcttataggcctttgatttgtataaatatggaggattaactccttgctttactgttaaagtaaccacattagttttaggatcaatttctaaattataatctggatttggtttgatcgaatcgttgattttattttcaacatttaaacaaaattcaactggatttttcacaccaacgattgatccatcatcctttattccaaatttaattttgccactgccataatttgcaaatgcactaaccgtttttagaaaagtattcgtcaatttctctttaaattctaaatttttggtttctctcatttaggtcaccgtttctaaactatttagttataattatactctttcacgcgcaaaaaaacggtcgaaaacgaaatcgaccgtttttacgcgcgttttgcgcgtgcctattatattaactttaaatcaatacataatactactagaagtttccatattaacaccatatctttctaaataattaaactgtatcatattaaatttcaaaaacaccagtgaaattaatcctctataacaagtcagcgtcttcttgagctttatcatccaagaatttttcatttggataaattggcgtaatctcaataccagccattgccctttcaatcaggccttcaacgtcaagacgagcttcatattcacgcgctttttccaactttggcttagtcttaggacgcggtggagcaaaaattgtacaacaatcttcaaaaggttgaattgataaatcaaaggtaccaatctcttcagctttggcaataatctccgttttatccattgttgcaactgggcgaataaccggagtagtagttacatcattgatagccaccattgattgcaaagtttgagaagcaacttgaccaactgactcaccattaaagatagccaagccgccacgttgtgcacgaatgcggtcagcaagctgcaacataaaacgacgttgcacagtcatcaaatagccttctggcagtttttccttgatcgtttcttgaatttcagcaaacggtacggcaataaaattaatcttaccagcgtagtttgccaaaataccagtcaattccttagccttagccaatgccttttcagtagtgtaaggtggactaaagaagtgaaccatttcaatatctactccgcgcttcaatgccagccatgaagcaactggggaatcaatcccaccactaagcatcatcacagccttaccagcagtaccaacgggcatcccgccaacaccatggagcaactgattagaaatataaacggcatcttgacgaacttcgattctcaagaccaaatcaggatgcttcatttcagccttcaagccatccatatgatcaaacaagtagtcaccaactagattattcaattgattagtgtcgtattcaaacttgtggtcactacgcttggtattaaccttaaaagtcattcctggcttaaaagtctcttgcatcaattccaaagaagtcttttcaatatcttcaagagtcttaggaatcttaattgctggtgagtaagtttgaattccaaataccttcttcagacgttggtcaacatccttgaatgatgcgccattcaggacaatgtgcatccgatcatgacgaggatgaaattcaatttgtgggaaatccttaagaactttttcaacgttacttgctaagcgattgatgaagtcctttctgttcttccccttagttgaaagctcgccatagcgaaccataacttctgtgtattccattaattttctcccaaatgattaattttagcaaaatgattatagatcttgtcaaagaccttaataaattcatccgcttcttgaagcgtattcgtctcatcaaaacttaaacgaattgcactagtagcaatcttatcatcaattcgcatagaaaccaaggtgctagcctcatctgccgtctttgatgcacaagcagaagtagttgaagtataaatatcttgatcttctagcgtatgaaccaaagtttcgccccgaattccctctaaagcaaagcaaagaatatgtggtgcaaagccatcgcttactggtgaaaaaatattaatccctggtttatcttttagataatcaacaattttagccttaatttctgcttcacgcttggccttttctggttcatcttctaaaagcaaacgaattgccttagccattcccgcaattgcaggcaagttctcagtacctgaacgcaagcccttttcttgaccaccaccatcgtgtaatggggtcagcatcttgccttcttttttatataaaatacctataccacgtggtgcatggaacttatgcgcagataagctcgagaggtctactcttggtgtaaaaaccttatcccaaatatttttgccaagtgcctgaacgttatcaacatggaactgaatcgttggataattttcaagcaaatcgctaatctcatcaattggttgaatggtgccaatttcgttattaacgcccatgattgaaaccaaagttgtatcagaatcaatcgcgtttcttaagtcattaacgttaactcggccttccttatcaactggcaatctggtaacgcgccaatccaaattctctaacgcgttaaaactattggctacagatgcatgttccacgctagaagtgataatatgcttaccaaattcacgcttttgaattgcagtccccttaattgcggcattatttgattctgttccaccagaagtgaagaaaatttcatgctgcttagtccccagcaaatcagcaatttgtttacgtgacgcctcaagcaattggtgtgcacgatcacccatcttatgcaaactcgaaggattgccccaaatattagtcgctactttattgtaagtatccaatacttgtggatctatcttcgttgttgcactattatcaaaataaatcactatcattaccccttcatttaaaaaacggtcaatcgcttgaccgtttcaagacttttcaattttagcttaaataatgaatcgcttcaattaattactcttctcttctgaataatatgcattttcaagtcgttgataactacctggctctaccttttcaattgctgtagcaattgtatcaagggcttccttatagttatattcattatatagctgcattgctgtcttttgtgcttgcgcaattgaatccttatctgcatatttatttgaatactgcatcgtcaattcaactaggttagcggaattaatgatgtcatctgcttcacgtttaagccgctccacatcatcagaaatttgaattaattcagctgagatcttttccatattaatccggacctgacttaattcgttgctgacatgaccaatctcgttgactaccaaagtgtacatttggacaaagctatcaggattgccaggcaaatttcgtctttcaagtcgacgataaactaatgaaacttcttgcttaaagcgcttgattgaatcattagctacattttcagaatcataaagtccatcaacgtcagttgacatcttagcctgctctgcatcaatttcacgcaggcgatctagcatctggagccatgaatcttgaatagcagagtaaacacccttaccatctgcgatattctgtgtatcaatagtgtactgatggtacatttcattgacttctttttctaagtctttactcttttccaattcgccatgagtcaattcatagctctcatcaatatgccgcaacttttctaccagtttctttgacgcggtttgctgatgtgagatcaaagtcagcattttactttgatttttttcaacaaatggtcttgccttgtattccttagctaaaacatcatacaggtcgtcaatttcgccagagatctttttattttccttggctaattcatccaccttagtctcagctagcaatttgcgcgcaccatcaatttcatcatgaatttccttgattctgcccaaaacatctacgctagtaaggtaatatttttctgaaatcatttttttataagcatcagacaattccttaagctgatcttggaacactacttcaagctgatgataaccctcttttagcggttttaagcgtttttgtaagttacccaaagacatccgaatcttggacaaaactcgcttagcttcaacatgatcaccttgtgaagaaagattttttgcttcttcaaagtcactctccattgatgctagttgatcttcaacctgatcaatcgcagcaccatattcaaaggaattggctaagatatcttttcttaattcacgataaactttaatcaaagcatcatattgaatttgattttccttatttgattcaagtagttccgtgaaaactgccttggtgttacgagcatcttcgagcgttggcttgataatctcctgtgcttgtttaatattctttcttgctttaaacaagcgataagttgcattttcattagcagcttcttcaactagcttatgcactcgcggtaattttttcttagctgcttcagtgtagctcttgcgccaagtatttaatgtagttaaactttcgccggccaaatccattttatccagtcgcgtaatatcatcttctagatgcatcttctcaatttcagtcactgctgcatcaatcgcttcaatttcttttagttgtttacgattgatcattagcattgctgcaactacgacaatgattaggatcaccacggcaataattataatagcttgaattgatgacatagtttatcctccaaaactatcataattataacaaaacctgaccctaataggtgcaaaaagctgttctattttcttgatttattattctgaactctatataatactattcgtgtaaaatatttgcagcaataagtgacaagaacgtcaacatcttgaaacgctttagtgaacgagtaacccgcgctgcattgggcgaaaatgtaaatccaagatgcacgaatgttgaacttatgcttaatattttactccaaaaattattgtttaaattttatggaggattttttatgtcaagatatacaggtccaagttggaaacgttcaagaagattgggtatttccctttcaggtactggtaaggaaatttctcgtcgtaactacgctccaggtcaacacggtcctaacaaccgcggtcgtttgtcagaatacggtcaacaattgcacgaaaagcaaaagttacgttggatgtacggcttaaacgaacgtcaatttagaactttgttcacccgcgctggtaagattcgtgaaggtcaacacggcgttaacttcatgattttacttgaacgtcgtttggacagtcttgtttaccgtcttggtttagctactactagagaacaagctagacaattggtaaaccacggtcacattactgttgatggcaagcgtgttgacattccttcatacgaagtcaaggttggccaaactattggcttgaaggaaaagtcaaagaacttacaacaagttaaggatgccttagaagcagttactgctcgtccatcatttgtttcatttgatgaaaacaaaatggaaggtactcttgtacgtttaccagaacgtgacgaaatggaaccagaaattgatgaagccttagttgttgaatggtacaacaagttactttaatttttacattttattttgtcgaaagtctttctcaatcgagaaaggcttttttctttgctacaataagtacataaaaagaaaggatgattagatgactgaagatttaaataaacgtgttgaacaagcagctcaaggtattactccacaaactaagcctgatgaacgccgcagatttttaggttcattacgtgagcgctgcttaatccgtatggacaatactgaagttaaaaatcctgaattaactgccctatttcttaaacatatcactgactttaagggctatactattttgatcaatggcaatatcactgatgatggcttcttgggagacattgaagccagttgcagcaaatatgatattcccttcactttagttaacaatgaaaccgcaaaaacaggaccacatgatacggcagtactagttgtagcgaaaaacgctatcaatcgaccacgaattgagctaaagcaagtttatccacctgagtttcctaaagaagaattagccgcacctaaaacaaaagaaagtttttggcataaactttttcacggagataagtaaatgaaaccattagcatatcgtatgcgaccaactaatttagacgaagttgttggtcaaaggcatctgattggtccaggcaaaattattcgccgaatggtggaagctagacttctgtcttcaatgatcctttacggccctcctggcatcggtaagacaagtattgctagtgctattgcaggctcaactaaatatgcctttagaaagctcaatgcagctactgacggcaaaaagcaattgcaacaagtagccgaagaaggcaaaatgagtgggacagttgtcttattgctggacgaaattcatcgtttggacaaaactaagcaggacttcttactgcctttgctagaatcgggacaaatcattttaattggggcaactactgagaacccttatatttcgatctcccctgctattcgttcacgttgccaaatttttgaattaaagcctctttctacagatgatgcttctcatgcaatcaatcgcgcattgaacgataaagaaaaaggtctaggcaaatataatgttgaattaacagatgatgcgcgtgctcttttgattgaaaaaggcaacggtgatttgcggtctactttgaatagtttagaattagctgttctttcaactaagcaagaattgcaagataaacaccaagatgatcaaaaaattatcatcactcaaaaagaaatggctgattcaattcaaatgaaggtgcaaaactttgatgcttctggtgatggacattacgatctagtctcagcatttcaaaaatcaattcgtggctctgatacagatgcagcgctgcactatcttgcccgattaattgaatctggtgacttagtctctatctgtcgaagactagcagtaattgcctacgaagatattggactagccgatccagacgcagctgaacacgctatagtagccatccaagctgcacaaatggttggcttgcctgaagcacgaattccactggctaatgcggttattgagttagctctttctgccaaaagcaatagtgccatttcagcaattgatgctgcactagctgatattcgaaccaaaaaagttgactcaattcccgccaacctaaaagatgctcattactctggtgccaaaaagcttggacatggcgtgaactacctttatcctcatgattatcaaaatgattgggtagcacaacaatacttgcctaataacctgcttcatgccagctactttgcacctaaaggcaattctaaaatcgaagctagatataaggcaacctatcaaaaattaaaacaaatgcagtctgataacttgcgcaataatcactaatctcgcgcattcaatatggttgacaagcacctgtaatatgcgtattataataagtgatctgagttgatcgacaagcttaaatgtataaagttgaccgatcaaactataagacgtgggagttggcaaataactaccgaatcggaatactgccttgttgcaggatccatattcgctgcgatgccagctaaaattttgaacattgcgggttcaacaagcgtcattatgctatgtttagtcaactcggatttctttagaatattaaaaaaggcggtctcaattgaccgtctttttctatagtggagactgttaaatggcaataaagattgtaatgattatttttatccttctcctactgttaacctcgtggtacatgtggcacagaaggaacggacattttttaatttatgacattggtggcgatccacgcttgagcaatattcttaagtggacttcagtcgcccttttagctgaaagtattttagggattattttgctattcatgggtaataaatatttaaatctaatcaccttattcttagcttcattaactattttggcttttggtttatcaattactcaaaataaagaataataattcactaatgacaagcaaaattttggtaaaatagaatatagaaagaggtgcttatatatgctttcacaatacaagaatattcaagttgcagttgatggttcaaaagaagctgacttggccttcagcaaggctgtagccatcgccaagcgtaaccatgcaacactagaaatcttacacgtaattgatactcgttctttccaaaatgtttcaagttttgattcagcaatggtagaacaagtttctaaagatgctgaaaagagaatgaaggattaccaagctcgtgccactaaggctggcgctgaagatgttcactactctattgaatttggttcacctaagacaatcattggacatgacttccctaagaagcacaatattgatttaatcgttgtgggtgctactggtttgaacgctgttgaacgtctgctcatcggtagtgttaccgaatacgtaaccagaacttctaaatgtgacgtcttggtatgtcgtactgaagaagttaaggatgctttgcaaggctaattatttagctttaataaccgataaaaaaatacctccaaaattcagatttgaatttttggaggatttttttaatgttatttctaaaaatcgccagccgtactgaacatgtaatcacgattatggaacttcatcgacaagattaatccaatcccaatcatgtttcccatcagagctgaaccaccctgagaaacaaatggcaatggaatacctgtcaatggcaataaatcaatattcatcccaatattttcaaatacgtggaacaagatcatcatgataacaccagttgcaatgtatgaataaaagacatttctggtatcgaacgagatttttaccatttgaataatcaggtataaataaatcaaaatcaatgctacacagccgacaaaaccaaagttttcaccaattaccgagaaaaccatgtctgatccacgaactggaacataaacgctagctttgccaaaaccattaccaaatagttgaccagaaccaatggctttcatactttgccataactgataagctcctgatgaagtatcaccagatggatcgagccaagacttaattcgttcaaattgatatgcttgaaagaaatgactcaacaatgattgcccagccgacgtagttactaatacaataaccccaatagctgctaaaatcaaaataccatataacggtacaataattttccaagaaatccctgatactaaaaccacgccaccaacgatggcaataaatactaacatagtaccaaagtcattctgtaactttagtaaaattgctaccggtgccagccaagcaataattttgcctaataacaaccaatcggtcttaatcgtgtgaccatatttatcattatgctctttgaccactcgagccaacatcaagataaaagctggcttcataatttctgaaggctgaaaagtaatcggccctagtttgaaccaacttttcgcacctgtatctgcagctacgcttctgttatataagaatagcaccgcaatcagcaaaaatattccgattccaaagaaaattggcgcaatcttaaacaactgttctgcatcaaactgcatcacaaccataataattgcaattgaaatcaagtaccataatgcctgcataactactgccctaacaggtgaaccaatatgactaggatcacctaatgcagcaacatagatacaatacaagctaattaaagccaagagtagcactggtataataatattccaggctaatcgatcgaatagacttgtttcattttcaacttttgccattaaataatcactacttatattttatttttcatgtaaggtaaagtatgaaagtaagtcattaatgctgctttcaagactgttagcaaacaaaatattgcttgtcttagaagtagtagcacgataacgcccctctaccttttcaattaaaccaatggactttctattaggaataacaacttcccacgttggcaaattctttcccttaagttcattaacttcaatatcaatattctctaattttttagacataaatcctcctacttgctatccggatgaaattttgaagcaataattggatcttcatatctctccggatgtggatttcgaaaaatagtaaaattatcaggaactggatccactccacccttgataaatgggttacaccttagtatacgacaaattcccataatcagccccaaaataggaccatgttttttcaatgcatcaatcatgtaattggagcatgttggataataccgacaacttggtggtagtaaaggtgaaatcactgtctgataaatacgtacaataaaaatcaaaatcttacgcaagtaatctcctcacttagtgtcgttgatgcttttcaatatttttaagcaaagtacctgttcctaaagcaactgcttctaatggatgatcagcaattaaaactggaacttgcaaataataagaaatcaacttatcaatattctttaatagggctccaccacctgttagcatgattccgcgatcaataatatctgctgaaagctctggtggagttgtttccaatacttctttagctgctgcaatgattgacatcaagcctggttctaaagccttttgaatctctggtgcagtaactgtagtctgcttaggcaaaccatcaactacgtcacgaccacgaacagtaatttgttcatcttggtctggttcaaaggcgctaccaatttcaatcttaatttgttcagcagttctagaaccgattaacaaattatgcttactcttaatgtaactgatgacagcctggttcatccgatcgccagcataacgtaatgattgagaagttacaatttcacccattgataaaactgcaacgtcagtggtacccccaccgatatcaatcaccatattaccttgcggtttaaaaatatccaagcctgcaccaacagccgcaactttaggttcaaagtctaaataaaccttgccgccaccagacttttcagctgcctgaataattgctttttgttcaattgaagtaactccagtaggagcacaaatcaaaatatttggcttggacataaagccttttacatttaatttttcaataaagtaagacagcattgcttcggtaatgtcaaaatcagcaattaccccattcttcaaggggcgaattactcgaatattacctggagttcttcctaccatctcatatgcctctgaaccaactgcaactaccttgtttgtatcggtatttacagctacaacagaaggttcatttaatacgatacctttaccagagacattgatcagtacgtttgctgtccccaaatcaattcctatatctcgtgccacgataaccctccataattattcaccgtccattttaccataaataatcatgactttcctttactgtccttgttttaacacaatctttaaaacaaattactcaattgcattgaagtatcgataaaagtaatgacaaaattgccaactaaaaagcctaagccaattgcaataaataaatataataattgcgtttcaaaaacatggcctttacgaataattttatctagttgaattgctttaactgcttgaaaagataagccaatcgcaatcaaatatataatgatactaataatgacatgaacgcctaattgaaacatatattttcctcaattttgacaaaaaaagacggatgcagcattttgtgcattcgtctcttccttcttctagtgacctttagtgttgtacacgctaattctgttcattgctcgtcttaaagcaacttcagcacgtgccatagtttgttcgtcatgtttttcccgtgcttccttcaaacgttgctcagcgcgttgcttcgctgcctcagcacgagaaacatcaatgtttcttgcgcgttcagcactatctgcaataatcgtagcaacattattcgaaaactcaatatagccacccgaaatcgcaatatgatcaactactgaatccatttcacggcttcgcttaatcttaacctcactaataactagtggagttaaaagtggtacgtggttatacatgattgaacgttcaccatcaacggcacgtacatcaacgatacttccacgatgtgaataaatcattccattaggagttacaacatctactttaaaaagcttctctggatctgccatttgacatcaccctacttttctagtaaagctttagcttctggatcacttggagttacacccatttcttgtgcttttttcaaaacatcttcaattgggccgacaccacgaaaggcatcttctggtaagtcatcaagatgaccatccaaaataagcttaaagcccttaatgctttccttaattggaacatatgaacctggtacaccagtaaattgttctgcaacaaagaagttttgtgacaagaagaattggaccttacgtgcacgtgcaacgatcaatttttcttcatcagacaattcatccatacctaaaacagaaataatatcctgtaattcatggtaacgttgtaaaacatgttgtactcgagtagctacttcatagtgttcttcaccaacaacttcagggtcaagggcacttgatgaagattcaagtgggtcaacagctggataaataccttgttctactaagctacgttccaagttagtagtagcatccaagtgtgcgaatgtggttgatggagctgggtcagtatagtcatcggcaggaacataaacggcttgaattgaagtaattgaacccttcttagtagaagtaattctttcctgcaattgtcccatttctgttgctaaagttggctgataaccaacggcacttggcatacgaccaagcaaagctgaaacttctgaaccagcctgagtaaaccggaagatattgtcgataaagagcaacacgtcttgaccctcaacatctctaaagtattcagcaagtgtcaaaccagttaacgcaacacgcattctggcaccaggcggctcgttcatctgaccaaataccatggccgttttacttaaaacgcctgaagctttcatttcgaagtaaaggtcgttaccttcacgagttctttcaccaacaccagtaaatacggaaataccaccatgttcttgagcaatgttgtgaattaattcctgaatgatagtagtcttaccaacaccggcaccaccgaacaaaccaactttaccaccacgtacatatggctcaagcaagtcgataaccttgataccagtttcaagaatttcacgactagtagtcaagtctgcgtacttaggtgcttccttgtggataccttcacgagggtgatcttttgaaaattctggaccaccgtcaattggttgacccaaaacgttaaacacgcgtcctaaagtatcttcaccaactggaacggaaattggaccgccagtatcttcgactttcataccacgacgaagaccatcggtagattccatggcgatcgttcttaagacaccatcaccaagctcaagtgtaacttcaaggacaatgctttcatcctctgacttaattacacgcaaggcattgttaatatcaggtaaattcttatcaattgggaatttaacatcgacaactgggccgattacttgaacgatttcaccttcactcaaaacatctacctccttttctttattactctaaggcatttgcaccactgataatttcagtaatttcagtagtaatttgtgcctgtctagcacgatttaattttgtagttaagtttgataccagatcattagcattatcagtcgcactctgcatggctgtcattgaactagcatgttcggcagtcttagcatccaaaatagcaccgtaaatagtagaacgtgcatattgtggtaacaacttcattaacacttgatttggatctggttcaatatcgtattctaattctttatgtgcttcagcttctttgacaccaatatctaaatcgacgattggtaacattttttcaacacgaaaagcagatgataatgagttaacgtggtgagtataacatacgtaaagctggtcatagacaccattcaaaaacatcttaattgcggttgaaacaattggtaatgcttcatcaaaagttggtacatctgaaacaccattcttttcataaacaacgttaatattgttctttttaaagaattgtgccgcaaccgaacctacagcaagaactttgatatcgtgtccttgagcacgttcgtcctcaaagatactcatcatattcttaatgacattgctgttataagaacctacaagaccacggtcacctgaaattaccaagaaacctgttgtcttgatattcttacgtggctgaatcatatctgctgtaatccccaaaccaaagacatcagtataatcaatttgagcaacattgttcttatcaattgagacgtctttttcacgtagattatcaactacttctgagctaattaaacgagaaatagttctacgaatatggtcgttataaacggtataacctttatcacgattttcagtttggttcaactttgaagcagagaccattctcatagcttctgtaatcttaccagtttgttttactgaagcaatttttttctttaactcaagtaaagatgcaggcatattctacctcctatttctcacttggtgtaaagctctcactgaattcttcaattgctgctgacaatttcttatcatctggcaattgaccagtttcacgaattgtcttgagcaaatcagcatgactgctgtcaaagttatcaaataattcgttttggaaacgagcaatatcttcaactggaacagcgtcaagatatccgtgagtcaaagcataaagaatcacaacttgcttttcaacaggaattggatcatgaagtggttgtttcaatacttcaacggttctttgacctctattcaacttagcttgagtagcttgatcaagatcactaccaaattgagcgaaactttcaagttcacggtaagctgcaaggtcagtacgcaaagtaccagcaaccttcttcattgccttgatctgggcgttaccaccaacacgagaaactgagttaccagcatcaatggctggacgagtaccagcaaagaacaaatcgctttgcaagaaaatctgtccatcagtaattgaaattacgttggttggaatatatgcagaaatatccccagcttcagtttgaataattggcaaagctgttaatgaaccgccgccaagtttgtcattcaacttagcactacgttcaagcaaacgtgagtgtaagtagaagacatcacctggataagcttcacgaccaggcggacgacggagaagcaaggaaagttcacggtaagcgacggcttgtttggataggtcgtcaaatacgattaatacatccctgccattgtacataaattcctcacccatagcagtaccagcatatggtgcaatataaagcattggtgctggctcacttgggcccgcttcaacaacaatggtataatccattgcgccaaaacgctttaaagtttctacttgagttctaacggttgattccttttgaccaacagcaacgtaaatacaaattacgtcttgccccttttggttaaggatagtgtcgatggccaaactagttttaccagtcttacggtcaccgataatcaattcacgctgaccacgaccgattggaactaaggcatcgatagccttaataccagtttgaagtggttgatcaactgattgtcgatccataacccccggagccttggcttcaattggacgactcttgtcagtcttaatttcacccaaaccgtccactggttgacccaatgggttaactactctaccgattaaggcgtcaccaacaggaacttccatgattcgtccagttctttgaacacggtcaccttcacgaatattgtcaaattgacccaaaataatgatacctacatcatttgattcaaggttttgtgcaataccgtatgagccgttatcaaacttcaataactcaccagacaaaacatcgttaagtccgtgagcacgggcgataccatcaccaacataagttacaacaccaacttcgctgatgtcaagcttatcgtcgtaatgttcaagttgttgcttgatcaaggaactaatttcttccgctttaatgctcaatggtttcacctcttttaatttttatcaattatctgcgcacggatcttcttcagtttattcttaactgatccatcaatcacgcgatcttctacttgaagaaccacgccgcctaaaatacttggatcaactttattctctagacgcaccacgtttaggttatatttcttagcaaaactttcacctaaacgtttgagttgatcatcatctagcttaacagccgtagttgcaacgccagatgcgaccttcttttcattatcataaagtaagacaaagcgatcaataatatcgatcaaatcagcaaaacgatcatatttaagtaacaaattcaaaaagttttgaacctcatctaaaaaatctttttcaattgcagtcaaaagatcctttttatctttattacttaaaataggatcgctcaagacactaatgatttgtggattggcttcagcagccttttttaattccaccatttcattataaacagtgtctaatgcatcattgtcttgcgcataaccaaatagtgcggcaccgtagcgtgctgcaatttcttctctacttaaagccattaatcatccaaccccttaataaattggtcgactaaatctttttggtctttagcagataaattcttagcaattactttttcagcgattgctacagaaatatcagcaacttgatcgcgtgcagaattcaaagcgtctgcttttgcctgatcggcatcttcattagcctttttgcgaattgctgcagcatcttcgtttgcatttgctacgatttctttacttgtgttttgcgcgttactcttagcgtcagagagaatttgtgttgcttcttgtcttgagttcttcaaggcagcttcacgctcattagcaagcgtttcagctttctttcgttcactagcagctgaatccaagtcatcaataactttttgccgccgcttttccatcatatctgatactggtccccaagcaaagtgcttaataagaagcatcaagatggcaaaacagatcaaataccagatagcattacctaagtaaatatgtgaggctgcaaataatgtttgaatagtcatttactgcccttctctctttaatactattcctttaaacagaaaattatctctttttattaaaggaacaaaatcaagaaggcaacaacgatagccaaaataggaacggcttcgatcaaaccaacaccaataaacattgttgctctcaagttacctgcactttcaggttgacgagccataccttcaagagtctttgaaataactttaccgttacccaatgatgcagccaaagctgctaaaccagctgcaatggatgcagcaagatatttaaaagcttctgacataaatttatacctccaaaaatttattctgtagtaaccttcttaccaatgtaaaccattgataaagttacaaaaacatatgcctggatagagccaatgaagacagagaaaccttgccaaatcatggctaatggagctgccaaaactaacgtaaatggtccaccagcatgtgctagatcattaccaattaaagttagcaaaacttcaccagcataaatattcccatatagacgtaatgataaggttaaaaagttggtaaactcttcaattaaattaattggaagcataaaaccaactggttgcgtatagctcttcaaatatccgccaacaccaaatcgttgtacgccgaatgtgaacgatagaagcaaggtcatcattgcaaacgacattgtcgctactggatcagcagttggtgatttaataaacatccaatcatcaactttgacttccatgaacatccctaattggttcataaaccaaataaacaggaataaaacaaatgcatatagtgataggtgattttgagcatccttgtcgctaacattatctttaacaatgccgttagtgaaatcaagtaaatactcgaacacattttgtctcttattgggtttcatttcaacttttcttgaaagccaaatgcagataaataaaactgctaaagccattagcgttgaaccgataataccagaaagttcaaaattcaagcccatgaatttaaaaacaaatgatttctccattacttcgtgacctcccttctcgtgctgaataaaactcgaacacgtaaatcatcttaacaccaaaaaaggtctttgtgtaaaatgaaagcgcattagagaaaatatttttctaaaaaggacgattacttagtaccaaatagtctgtcaccagcatcacccaaacctgggaaaatataaccattatccatcaatttgtcatcttcagcagctgcataaatgtcaacgtcaggatttgcttcttgaactgccttaataccttctggagcagctaccaaaacagcaagcttaatttccttaacaccacgcttcttcaatgcagcaatggcatcattagctgagccaccagttgcaagcattggatcaacgactaaacattcacgttcagcaatatcctttggagccttgaagaaatattcatgtggcttcaaagtcttttcgtcacggtacatcccgataacggcaatcttagctgaaggaaccatttcaaggacaccattaagcatccccataccggcacgtaaaattggcacaattgtcaacttcttaccagcaatttccttttggacagtcttacccattggtgtttcaatttcaacatcttcaagtggcaaatctctagtgatttcataggtcattaacccaccaatttcaccaacaatgcgacggaattcatttgaccccgtatccttgcgacgaataatagtcaacttgtgttgaatcaatgggtgatccaaaactacgaactttcccatatatgcctcctataaaaaataatatgatcattaaatattttaatcaaaaacgcaaagggtttaaagccctttgcgttttattttttatttattgaaatgatgtccacctgcagctttattcaatcgattcatgtaagctaaactttcttcaccttcatgaaatccttgtacataaatagtttcgatatcatcttgatcatcgaaatagcgcaagccaccaaataagttatggtcggcatcaactaaattgttgcccagatcaaatttatttgcttgaggtaaattaattttagctaagactggcgctaaagctgctacaccaattttttcattaaaatcaatttttgcaaaatcagcaggatcatcaaccacgactaccggctcacttggagcataatgacggtatttcattcctggtgccttaggtatatctttgtctgacactttgcccgtgttaattaaaactttttcacctaaaacttcgcttaactcttctggagtaatttcaccaggacgaagaacgattggtgtttctaccgataagtcgataattgtcgattctaatcccacacgagtagggccatcatcaataattccggcaatcttcccttttaaatcatggtaaacgtgctctgcagtagtaggactaggcttagttgaggtattagccgatggtcctacaattggataacccaatttagcaattaaatcatgagtcaattgatcatcaggacaacgaaatgctacagtatcaagtcccccagtaactgcatctggcagagttcctggtttaacaaacaatagcaatgtcaaaggacctggccagaaatgtttaattaatttcttagctctttctggaacttctttagcatacttagccatcatttcttcgtcagaaacagtaacgatcaatgggttatcacttggacgtcccttagcagcataaacgcccttcacagacttttctttggttgcaattgcacctagaccatagactgtctcagttggaaaagcaaccaattcacccttagctaacaacttaactgcatcattgatttgatcttttttaaaaatcttcgtttccatcattcttatttttgccaccttccatgaaccatgcgtggcttgccggccatatcttttctaaattcgatttcaaaatcaggcaattctttagcaaacaattccttcagttgttcttcttcgctaaaaccaaattctaagaaaaattctccatggctattcaaatgctcacgcacttgcttagcaaattttttatagaagtctagaccatctttgccagcaaaaagagcttctttaggttcattttgcaagacattttcatccattacattcttttcgcttgtcttaatatacggcggattagagatgatcttatcaaattcttctaagcccaacagcacgttggctttacgagtagttacatcaagatcataagttaaaaagttttcctcacttgttcttaaggcagtatccgttacatcactagcatataaagttaaatctgtaatgccttttttctgtgcttctttagctaaagccacggtaatacagccagaaccggtacccaagtcaaggacttgatcacctgatttaagtgtctgcaatgcccattcaaccaattcttcagtttcaaaacgaggaatcaagacaccgcgttgcaccataattttatagcccaaaaaccaagcataacccaaaatatactgtggagatatgcccttagccaatttttcgatatctttattggcctgcttaatctggtcagcagttaagtccatttcttgcttcagttcaaattcacttggtgtcaagcctaagcgctctgctagaacataatcaacatcctcaggacgcgcattttcagcactctcacccgctttaatacgcatctgctttaaagtcattttaggcattttgatcagccaactcctctaattgcttagtttggttgtaaagaattaatgcatcaataatttcatcaagttcaccgttcatcacacgatcaagcttgttaatggttaagccgatgcggtgatctgttacacgattttgtggatagttatatgttctaattctttcggaacgatcaccagtaccaactgcattctttctcttagcatcgtactgagcttgattttgactttcataatagtcataaacacgtgatttcaaaatttgcattgccttttcacggttctgttgttgactacgttgatcctgcattgcaactacaatcccggttggcaagtgagtcattctaacggcactagaggtcttgttaatgtgctgaccaccggcaccacttgaacggtaaacatcaacacgaatatccttaggatcaatatcaatgtctacttgctcatattcaggcataacagcaacagtggcagttgaagtatgaacacgtccttgagattcagttactggaatccgttgaacacggtgtgcaccattttcatactttaatttcgaataaaccttgtcaccagtaatcatgattgccacacgtttatagccgccaacctcagtaggttctgaatcaatcattgaaaccttccagttttgacgttcagcatatttttcatacattctaagcaaatcgccagcaaacaaagaagcttcgtcaccaccggcagcaccacggatttccatgataatatctttatcatcgttaggatccttaggcaacatcaaaatcttgatttgatcttcaagctcgggaatttctttctcaatttcagaattttcttccttagccatttcaattaaatcaggatcagtttcactggagataatttctttattatcttcaatctcttttttgtcctctttgtacttcttatatttttgtactacttcacgcaaatcggcttcttccttagaaatctccatgtagcgcttagtatcattaataacttcaggatcggccatcatttcctgaagttcttcatagtgagctactagaccctctaattgagccataactttatccataaactaaaaatcctctctatctttcaacacctgggtgaaagtaatgatagcgacaaacaggataataactttcatcgccaccaatttgtacttgttcaccctcataaacaggcttgccattgttaattcttaaattcattgttgccttgtgtccacaataatgacaaatggtcttcatctcttctattttatcagcaaaaatcaataaattttcactaccttcaaatagatgattttgaaaatcgttttttaagccaaaggtcattactggaatattgaacacatccacaattttagcgcattctaagacatgatgtctcttcaaaaattgtgcctcatcaattaacacacaagctagtttaccatcaccatcagcaacatctgctttgttcatctttttaatataatcaaatagattcatatcagcagtaattggaattgcttctcggtgaagtccaattctagaagcaatcgttcctacaccgctacgattatccaagccactggtcattagggcaatcttgcgcccctgtgcttcataattgtgagctactttcaagatctcaattgttttgccactgctcattgcaccataacgaaaaaataattgcgccatgctggccctcccttttaacaaaaagtcttcgccttaatagtatagaggaaaaaataaatttgtgtaggtattaaacctcgttttcatcctcgctctatgctaaacttagacatagttttaaagtgagggatgtacatgagttttaaatcaggaattgctaaagttgccggtaaatcaagctattggtttttgcataatgcccttaagggcggcaccagttttccaggcaaattagcaatgaaaattgatccagaagttttaaattctttagccaaaggctatgaaactgttattgtcacgggaactaatggtaagacaatgactactgctttgattgttgaagctttaaagaaaaagtatggtgatgtgttaactaatccatctggttccaacatgcaacaaggaatcgtgaccgcttttttggctcacaagcacaagagagttaaaagaaaaatcgctgttctagaagttgatgaagcaaatgttaaaatggtgaccaaattacttcatcctagcgtctttgtattaaccaacattttccgtgatcagatggaccgttatggtgaaatctataccacttatgacaagatcgttaatggtattaaattagcacctgacgctacaattatcgctaacggagatgcaagcattttttcatcagttgaattgcctaataagaaaattttttatggctttaaacttcctgatgacaaacctgaaaacgacttcaaggctccagtcaataccgatggtgttctttgtccaaaatgcgaccacattttacattatcatgaacgtatttatgccaacttaggtgacttcttctgtcctaactgtggctaccaccgtcctgatttaacttttacagttaacaagattattgatcaaacacctaatagctcaacgttccaaatgggcaacaagcaatattccattaatattggtggtacttataacatttataatgccttagccgcctattctgttgcacgccactttggattaactgaagctgaagttgctcaagcttttgcagaaaataaacggatctttggtcgtcaagaattaattcactatggcgataaggatatcgatttaattctagttaaaaacccagttggtttggatgaagtcttgcacatgcttaatacagaaaaagatgattattcactagttgccttgcttaatgccaaccacgctgatggaattgatacttcttggatttgggatgctgattttgaaggattagacaaagaaaagattaaaaagatcctcgtcggtggtcaacgctggcatgatatgggctttagacttgaaattgctggctttgatccaggacaaatgagtactaatccagatgatgatagcctaattgaagaaattaaaaaactgccaactaagaaggtctatattctttcaacttatactgcaatgcttgcacttagaaagaagatggccgaaaagaaaatcattaaggctggtatgtaaatagaaaggattcccgcgggaatccttttttgtgtacaaaaaaggctgtagctctaatgctacagcctttctaattattgggatattggggctcgaacccaaacatccaggaaccagaatcctgtgccttaccaatttggctatatcccagtaaatcacccgtacgagaattgaactcataactccaccttgagagggtagcgtcttaaccatttgaccaacgggcgaatcaacatttataattatgcttttttcttctatgcttgtcaagtaattttaactataataatgctaatggatggtgaaacatgatcgactttaataaaacacagcatttaattgaatcaatggtttttgaacgcgttgttccaggcgtcaattacacttttatcaaaaataagcaaatttttacatcaactactggttttgctagtatctacccagaagttactcagctgagcccttttgcagaatacgacctagctagtttgactaaggttttagcaacagaaaatgtcttgcttaagctttatgaccaaggcaaacttaactttaccgagcccttgcagcaattcgttcctgaatttaaagacccgcgtgtacgcctttatcacttgctaacccatactagtggcattcgtggctggatcccccaccgcgacaaactagatcatgatgccttactacaagcaattatcaatctgccagtaactgacgaatttgaacacaagatgcggtatgccgatacaaactttatcttacttggattagttattaaaaagatttttggtaaacctgtccaagaagtagtcacagagcaagtcctcaatcaaatgccgcttgaaaatactactttttcaccacaaaaagatgattgcgtgcctactgccctagttgatggccatgtcttgcaaggtattccacatgatcctaaagctagacaacttggaatagattgcggttctgctggcttattttccaatcttcaagacttagttaccttcgcccaaggttatttaggactaaaggatattttaccttatagtcaaaagactgtcagccagctatttgataataaaaatccccaaggcataaaaccacgctcttggggatgggaccttcggtttgatccaaagcaaaattatccgatcattttgcacacgggttttactggtactttaattattcttgatcgcatcaaacgctctggtctaattttattgaccaatcgagttcatccgactggacacaacactgttttcttagctatgcgcgaaaaaattatccgtagttttatcaacgaaaacgccaaaatataatttatagaaaaaagacggctgtgtgtcagtcgtctttttatctctcactaaatttcatcatccgtctagtattataacttattttaacgctaatgtactagtcaaatattatttttctgctttaaacattttccagtagctaattaaaatgattaatgccattaataaagtaaaataaaaggccgcctgactaccttgagctgtcgctagtgcgtaggacgttgcaccttttttctgccagatcgacataattgctgctaagatagttgttcctacagaaccggctaattgctggctagtctgacaaactgcggttgcatcggcgcgcaatgctcctttttccacctttaaagcttcagctagcgtgttagaaaatgacattctgtgtcctaacatcatgatgccataaataataatgatcatcatcacagtcaaatttaagccccaaatagcaaataacaagcagctgatcgccattaagaagccacctaaataaagtggcaatttagctccttttttatcatataggctaccaaaatatggattgagtagccctgcaataatactacctgatagtaaaatcaaaccaccaactaaagatgtttgctttccgacaatttggatgtagttaggcaatacaaaactgataccaatattattaaattgcaataaaaagtaagctaacgcaccataaacaaacgctttttgcttaaatacggctagatctaacaatttcttggatgattttttagataatctaacaaataaccaaattaaaattgcagtcacaattaataaaatccacattaaaggattagcaaatccattactaatttgatttacgcctaatgtcaaagtaataaatgctatagctaaaacgataaatgatagccaatcaaaactatttttagtttgttcatgatacttaccgactacaaatagcccggcaacaaaaacaatgatcgcaaaaattgtaacaaaaccaaaaatccagcgccagttaagataaaaagtagtgataccgccaaatgctggtcccaaagtcggtgccatagctactactaagccggcgattcccatgtaaacgccccatttttcgcgaggcataacttcggttactaagttaaacatcaacggtgtacttaatcctgcacctagagctgaaatcagccgacctaacaataaaataggaaaattaggtgctacagcactaattacgcttccaatcataaaaccaacgcaagcaacaataaacaattgccgcgcagtaaaacgttcattcaaatatgaagaacaaatcataataatcgcaatcgccaataaatatcctgttgtcgtccattgaattatatccaaaccgacaccaaattgcttcatcatcgtaggaaaagtgacgtttaaactagtttccgtcaaaattccgacaaatgacataaacgcagctgataatactgctaaaacatttttagtattctctttcacacaaaaatcctttccacaaaaaaagaaagagcaaaaaacctttgtttccaatgtcattaagttaagacattgacaaattatcgacttggacttttaagatcattcatttgcgatttatcgcatttgaatgctcttttttcatgccaaataaacccaaatcttgtttagaaattaggctacacgatataaataatatacagctgatttgggtttgagatttcttttgtcttttcgtcctggtctgatcggaattgtgtaatgactaatttgaataagaatctttttaaagatttcagttgaagaagaaattatatacatagcctggatgacaaaacatgactgtttgaaattgatcgcatattgatacttgcattttttttgtggtacatatgcttgagcatcaatttgactgactgcgttaaacataatcatgtgggcatagatctccatttcaataaatctatcctgcttggaatgaaactgtacgctacctaaagcatatttcaactttttgaatgaagtttcaatgccccagcgcaaatggtagatttctttgatcctttttaagggataatcggctctatttagattagttagaacaacttcccattcttctttgcctgatttaggatcattaattctaaatttacaggcacgaaattttattgtacataactctccaaagtcccagctgccatctttggtatttttagaccgatattttatatattgacggtaatgatggttaaccaaatgaacgttttctgtagccttatgggtttcataataataattagaggtagtcacccagcaagctatatccttatcacactcttgattaggcaactcagctacttccttaaatgcgccatatcccgttttagtacgtatgacataataacagttaggcaggcgattacaattttcaatcatgttaaagccggtataacctcgatccatagtaactatatatggtccgcaatttagctttttaagcatttgaacggcggctttacgttcatccatctttgacttaggctgaaagatgcagtcttgataagtattatttaacaggtcatagagtgcattaacatgaatttggcaatatggctttcctttatgattgagatttccaacgatattctctgatttaggattccagatttgattaaaatcagacccatcaatggcaaatatacgatatttatgatcaaataactggatattaaataaattctgattaaatacagttagaatatgcttaaaacatgcgggtgaaagctgacctttgcgttggacataagcggaagtactgactactttatcgttatttttaatagctttttggccaaaagctctaaacaactcactggtcaaatcttttccttgcatattaatagtagttttaatgactgtagctgcatctaaaaaccgcttcctagtgaaggcatgaggatcatcgataaaatcatgaatatgctttccagtatcattgataatttgatcaagacgatctaaaatatttctgtgaagggctttcataattaacaccagctttctggcaataattttgaaggtttaataatttaatcagagggcgaaaaggtaggttcttttcgcctttattttatgcaaaaaaagaaccaaatcataatgattcggttctacagagattagattcaatttgtcaatgtcttaacttaatgacattgcctttgtttcctattctttctttaattagcacagctaattatattaatacgcatactatcaaatatgctgagtatatctaatattaaagacgcttagctaaatcgtcgtgtaagttttcgtaacctggcttgttaagtaaaccaaacatgttacgcttgtaagcttcaacacctggttggttgaatgggttaataccgttcaagtaacctgaaatagcaattgctaattcgaagaagtaaatcatgtaacctaaagtatgtgcactttggtctggaatgttaacagtcataactggaacaccaccatcggtgtgagccaaaacaacaccttcataagcacgatcgtttacgtagttcaagctcttaccttccaagaagttaagttggtcaaggttcttttcatcgcctgggatcttaacatcatgacgtggattttcaacacggataacagtttcaaataaattacgtaaaccttcttggatgtattgaccaagtgagtgaaggtcagtagtgaagttagcgcttgatgggtaaatacctttttgatccttaccttctgattcacccattaattgcttgcaccattcaccgaacattcttaaacttggttcatagttttcaacaatttcagtagtgtaacccttacggtaaaggatgttacgaagtgctgcgtattggtatggagttgcctttgacaaatcagtatcagtgtagtcagcacgtgcgtctgcagcacccttcatcaattcgtcaatgtcagcacctgaagcagcgattggaagtaaaccaacagctgaaagaacactgtaacgaccaccaacatcatcaggaactacaaattcttcgtaaccttctgcatcagcttcagtctttaaagcacccttttgacggtcagtagttgcgtaaattctcttagcagcttcttccttaccatacttcttgattaacttgtccttgaagattctgaaggctactgatggttcagtagtagtacctgacttagaaattacgttaacactgaagtccttgtcgcctaaccattcaatcaagtcataaaggtatgagcctgaaagtgagttaccacagaagacaacagttggcataccgttcttttccttgccatagaaattgctgttcaagaattcaattgcagcttgggcaccaaggtaagaaccaccgataccaatacaaatcaaaacttctgaatctgattgaatcttcttggctgccttcttaatgcgggcaaattcatccttgtcatagtcaactggcaaattaagccaaccacggaaatcgttacctgcaccagttccatcgcgaagttcagtgttagcagcgttaaccatagcttgcatttcgcttaattcattttcatgaacaaattgtgttagtttactactatcaaatttaattaaactcataaatctgcttcctaactaaataaaatatttttcacaaacctattttaacaatcttgatttataaataccagtacattataagcgcattcaggcttttttgacaattttaaaaatcacataaccccaaattgctccacaagtattgaagaaaacatcatcaatatcgctaacccccgtcaccagcaaaaactgcagagtctcaattcccactgaaaacagcatccccatcagtaccgtccttaaaaacgttgctctttttgaaaaaacaatggggaaaaaaatgccaaacggcacaaagcacaagacattgccaaaagaattataaaagaaatccaaatgactgggagcatagactaatttccaagtttccttcatgaataccaagttaatatcactcaatggcctagagaaattaaaatcaagctgccacggaaagtaggtatttctaaaagttgtcagcatcaaaactaagattatgtaaaaagaaaagacccaaacgctagcttcagacctaattgatcttctgcggcgcaccaaaagaagccaaattaagcgcaatacagcaaaaattaaaaaataaaatattgttttatccagcgctaataaggttaatttaactaatgcaaagtggttaatattagttgcatactgtttagctaaaaaactataaagtgggcccaaaaatagcatactttgcctctttccaaaatattcattatagattatacctattttcacggctggaaaatcttaaaaaaaagataactcttagcaaattattgttttaaaagaggtgaaccattaaaattaaaagatgttaaaggagcattatatggaaaaaaagaaaattatcagttttattcaaacacgaacgggctttttaacccttttagttgtttgtttctggctgaaatatatttttgcagcttattttgatttcaatttaggcttgagcgacccgtatcaacatttcattatgtggctcagccccgtagggtccgccatcattttaatcagcttcggtttttatattcctaaaccgctgatctcttacatcacaatgttaattttagactttgccaatacggcattgctttttgcaaatattatctactatcgtcaattttcggactttttaacaattaaaacgatgtctaacgttggtaaagtttcgcagggtctaggtaaaagtaccgttgcccttctgcatccaacagatattattatctggattgatttgatcgttattgttactttactgatcattcataaaatcaaaattgatcaaagatcttacggcttatccaccccatttgcgattacctcagtaggcgcatttgtcctaactcttaacatttttttggcagaaacctctcgtccgcgcttattgcgcaacacttttgatcgctcctatgtcgttaaataccttggtattgacacctttactgcttatgattgcttcaagagtgcgcaaaatgttcaagtcactaaaaatgccaacgctgcggacttgaaccagattttaacttttaccaaaaaacaaaatgctgctccatcttcctcatattttggtattgagaaaaaacgcaatgtgattatcatccacttagaaagtttccagcaatttttaattaatcttaaggttaatggcaaagaagtgacgccgttcctaaattcactttatcaaaataaacatacgctcagttttaacaacttctaccaccaagttggtctaggtagaaccagtgacgcggaaaacatgctagaaactagtacttacggtattcccgacggatctttattcacttctttaggttcggaaaacacctttcaagctgcaccgcaaattttgcgtcaagatggctatacttccgctgtctttcacggcaacgtcggtagtttttggaatcgaaatgatgtttataaaaatatgggctataattatttctttgataaaaattactatagctcccaaagtaaagatgcaagcggctatgggttaaaagataagctgctttttgccgaaagcgttaaatatttagagcagatgcagcagcctttctatgctaagttcattacggtaaccaaccacattccgtttaacttagataaagaagacaaggaccctaactttaagactacaaacactgccgaccaaactatcaacaattactttgaaactgcccactacctagatgaggcattgcgtgaatttttccactacttaaagtcttctggtctttacaaaaactcaatggtagtcatttatggtgatcactatgggttaagtaattctgaaaatgaaaccttagcaccaattattggtgaaagctctgacacgtggaatacttacaataatgttcaaatgcagcgtgttccattcatgattcatgccaataatttgaaaggaaaaattaatcatgaaattgctggtgaaattgatgtcttgccaacactgatgcatttgctcggtattaacaataaaaactatgtccaattcggtagcgacatgctttcgcctaaaagacaaaattggatcgtctttcgtaatgggaccattgtcagctccagatatatcatagttggtgctaaaggaatcaaaggtaccgtttatgaccgagttagcggtaaacaaatcattaattttactcctcaagagaaaaaagaaatctctgagctagcacaaaaggccaaggcatcattagactattctgacttattaaacaaccacaatttgttacgcttctacaccccaactggctttgtccctgctgatccaacccaatttgattattccgtcaattatcaaaaaatgatcgctatcagaaatgaattagctggcaattccacctcgctttatagcagacatcgcggtacaactactaatctttaccgtactgatgccgctgaactaaaagatagaaaacaagaaattacccaagttcctgacagcgttaaaaatattaaagagaatacgaaaaacaaaaatagttcagaaaataccaataactaaaaagaacgcacagacctttcaaaaaaactgtgcgttcttttttagtttttagctacaaactgttcatagcccttgtcataaaaggtcacggtgaatgtggaacctttacctggtgcggaaaatacttctactttgccaccatgttgcttaatcaaagaagaaacaatcgcaagtcccaagcctgattcgccagttcccattcgagcacgcgatggatcagccttgaaaaagcgttcaaaaatatacttagtctgattcttgctcatgccaataccattatccttaaccgataattgtgttccatgctctatccgtttacccgaaataataattttgccatcatgagtgaattgaatcgcattttgaactaagttaaccattacctgggtaaaacggtcacgatctgcataaataggcaactgatcaggtgcctctacaaccagctcatcgttggctttagttgcattttgttttaattgcgacttcaaatcatgcagaataattgtggcattaaagttagtcttaaccagcataatttgattatttcgaatcttttcatagtccaaattttcattgactaaccgaattaatcgtttagtttcgcgctgcattaacgcgattgacttcggtttagaatcctctgggatagcatcgtattgcaagccctctagaatgccattaattgttgtcaatggcgtccgcatttcatgagcagcatcagccatgaattggtctcgtcgctcttcttgagccttaacctcttcgttcgactgcttcaaagcctgcaccattttattgaaattctcagccaattgatcaatttcatcgctatctttatgctcaatttgcacattaaagttacctgatgcaactttttgcgtagcacgtgataatcgcttaattcgtttagttgaataataagaaataataaagctcagcaacaatccaaccgctacagtaattaacaatgcacgcaacaaattgcgtttagccattaaaatcggtcgctcaacatgctttactctcgatcctatccaaacaatgccaacaagatttttgccattcatccatggaaccaaaacccccgtgtaggcatccttagttgaactaatcggtgaattttcattatgattattttgaattctaatctcttgcccattttttaaagtagtaaaaacttcttgtgaaagctgaattctagcctttgttttgggataaatctgctcatttttatcattaaaaatacgtaaatgagcatcatcaccacgaagaacatattctaattgattcaagaagttattgctaagcaatgcagtcccattttggctatcagcttccgccaagtttcccaaagaattagcatagctttccatccgctggtagttttgcgtataagcttgattacgcgcataaccaatctctgagtaaccaataatcgagatagttgtcacaataatgagtaagaaactcaacatattttggtaaattaatttcattatttgacctgcgaatcatcaaacttgtaaccgacgccccaaacagtttggatcaccttggcaccaaccttctctaatttctgtcgaagctttttaatatgagcatcaacagttctttcttcaccataatactcatagccccaaactagttctagtaattggtcacgagaaaagacttgtttaggcttttgtgccattgtatacagcaaatcaaattcttttggtgtcaaacccattaccggctgattatcaaataaaacttctcgtctattttttgaaatcttcaaatgatcggtcgtaatctcatagtcttgattatcttcttgagtatgagctggttcttcttccatcatcacgcggcgatgcaaagccttaatgcgggcaatcaaagcaattgggctaaatggcttagtgacatactcatcagctccgatacctagccccaacacttgatctgattcactgccacgagcagtaagcataataattggcactgtcggcgaaattgcccgtacctctttagctacttgaatcccatctttttttggcaaattcaaatctaacgtaatcagatcatacttatccgcgttctttttaaacatatcgacggcttcgacaccatcaacagcaatgtcttgttgccaaccttcttttttgaaaaacattcccatcatttcagctacggaagtgtcatcttcgaccattaatattctcaaactcattatcaatccctaaatccttttgttctcttatgcttcacttgatcaggatcgacatagtcatgtggcaattcatgtcgtttagacaaaaatgttttcaaacttttttcggtataaacaattggcaataagataaataaataaaatgttaacagccaaatgagaaaatagcgatcccaattcaaatagtgaatgattactcctaacagtgcttgaataaacccaaacaggatacaataccagcttgcccgtttctgagcaaacttaaaactatcctggttaacttgcgcaagataagataaatagccataaattcggttgggccttttggctggcgtaatcagccaaatcaaccctaccgccaccataactaagccacaagcgacatagatcacgatttctcactcctaattctgataaatttaaacggttattcctcacctggtgcagacataactattctcattttaccagtgaaagtgaaattcttcatctcatttggaataattaaattagttcccatcttcaaatcatatgacttgccatcagcttctaattttccttcgcctttgataacggaaactaacaggtatggatgatcctttaagccggtcttccaagtaccatcaaggtcaatttgccacaaataaaagtgtggtgaaagtggtggttcaaccaatgtcttaatttctgcatcttgatcttggctagtcttaacatctaacttaggatcaacatggggaacagtggtcacatcaattgacttttgagtatgaagctcacgctttttaccatccttgcccacacgatcgtagtcatacaagcggtaagttacatcacttgactgttgagtttcaattactaagcatcccttagttaaagcatgaattgtacctgctggcacatagaagaaatcgcctgctttaaccggaacttttctgagcagcttatcccattcgcctttgtggatcatatcagctaattcttcacggctttttgcatgatgaccataaataatataagcacctggatcagcttgcattacataccaagactcagtcttaccagaatcattttctactttgcgagcataatcatcatccgggtgtacttgaactgataaattatcattagcatctaggaattttaccaataatggaaattccttggccttaggattgccaaacaattccggatgcttcaagtaaacatcccgcaatgacattcccttaagtggcccatctgttacagttgacgcgtcatccttgtaacctgaaataatccaagcttctccaacttttccttctggaatatcatagtgaaaaatatcatctaatttacgtccaccccaaatttttggcctaaagtatggggttaaaaataatggttccatttaaatcacctcaattaaagtataaactttaaggcagaataaatgaaacccttttcttagatatatgtatactattacgcgtggtgctagttaaatctttctagacaataagccaaattataagctaaaattgcaatttccaaccggctttgaaagcctatcagactacgtgctcgattgttctcggcattgtaataggtcagaagcgaaaagtcgctttcaattgttctgcgaatagccatcaattgatgatcattgtgctttttagctcctgtcatatttttacgatatggtgtccaaagttcataacccatttgttttagctgttgatgcagttctttgcctaaatagccttcgtcgccaagaagatagtaattagatggatgggcattttccagcagttcaactgtctccttggcatcatgaactgatgcttttgttacgacataatcaagaatgtaaccgtcatcgctaacaatggcatgaactttgaaaccatagaagtaaattttcttggtggccttataaccaatgttggcataaccgcgaaaaattttagcacgatagttgcgaattggttggcaaacaggtaccggaaagctgtcaatgatcaagaaatgtccattcaggtcaacctttttattcatttcttgccgtatctgataaatcaattgcaatagctgacgtgaacgccgattaaaacgtgagtgtgataaacaattgaaacattcacagaatcttctttgtgattcaattcctgtcttagcttgccagataagtaaagccaaaatcagactgtccgtagttttaatttgatcaacatttcgccgatgagtaaactcagccggtgcatacaaacgataccagtgccgacaaattatcactaaatctttaaaactaacttgtaaatggtggctaaaacgcttaagcttaaggcagttcaatcagatcagactcttttctattattactatttacaagtcgagtctaacaagattggacttttttattaactaaaacgatttaactagcaccatgcgtatactatttgttttacatgtaaagctacttgttatacttacgaatacctgtagctaatctttgcatcccatccttgaccatcgtcaaaggacaagctagattaattcgaataaaatcatggccatttccacgataaacactaccagctgaaataatcagcccagtttcttggcgaatgaactctgctaattcctgtgaatcagtactgatcttttgcacatcgatccacatcaaatatgtcgcattgcccgaaatgatttgtacttcaggaatgtttttttcaataaaattctgcacatacgcaaaattttgctttaactgttttttcaaagcattaagccaatcatggccttgctcataagccgcaatcgttgctggaatcgccaataaattaggctcggctacttcatcactatttaaaccgcggttaaccatattgcgcaaattttcattaggaacaattgccgtagcagaatgaagagcagcaacattaaaagttttgcttggggacactagtgaaatcacactattttgtgcttcacctgttacagaaaaggctggcgtgtaatctggaccttgtctaaccaaatcaccatggatctcatccgatagtaatgttacatggtattggtgacaaagatccgcaattttttgtacttcttcactagtccaaacttttcctactggattatgtgggttacaaaaaatcatcaaagtcgttagcggctcagctaatttttgttccaagtctgcccagttgatcgaataacttttaccatcgaaagctaaatcactcgacaaaacatggcgcccattattcaaaatggaattataaaaaatattataaactggctcttgtactaaaacattatcaccaatatgtgaaatacggcgtacaattgatgaaatagcagggactactccagtagtaaaaatcatccaatttgtttgtggccgatgattatgttctgtttcataccaatcagcgacagcattaaaataatctgcttgtgggaactcataaccaaatgcacctaatgtcaatttttgttgcattgcctcgataatttcaggtgccgtcttaaagtccatatcggcaatccacattggtaattcatcagacttcacatcccactttactgaatcagtctttgacctatctggtgcattttcaaaatcatattgcatatatctcactaatcctttggtgtttggttcgtatcagaatgaacaatttttgtacctattttcggacaatcaagctcggttttagatggatctaccttatctggatcgataatcaaagtaccaatctcaggtaccgtaattttaccagaaattgggtttttaatactatcaatctttgtattaagctccacatctaaattagaaacatattcaaaagctaaatctgtatgaatcaaggaaccattcttaatctcaagctgatcaatgtagttcaagccctgatcactttcaattttacaattaattaacgtaatgttgttagtattccaagctaaatattcaccatcaataattgaatcgtaaatagtgacattattgcaattccaaaaagcatctttagagataaaagttgaattatgaacttcaatgttttctgcaccatcaaaaacataatttcccacaacggaaacgtgatcaagataaatattctggctatctttaccaaaataatcaccattaatttgagaattggtaatcttaatatcattacaagtccacattgtttcttctgcgttagcaaaatgaacattatctaaaataatatgacttgtccttctgaataatttaggtgcctgtaaagcactatttttaattgaaatattcttggtataccaaattccagaccgtgacatagtttcaaacgtggtattttcaactttcacattttcatcataccaaagtggatatttccatttaaaaattgaattctttaatctgatatttttagcttcttttaagggagattcaccactgccaaatgtaataccatcaaggattgcatcagttaatccataaagaattctttcacctgcaaaatatttatttttgtattccataattgtttccacctttttgttaatttaataatcattaacttaaacttcccacacgcaaaattgcttgtttcattgtgattctgcgtgttttgacaaatataaaaggcacaagtccttttcattgctataattatattgaccaaaacataatttatttgcatgaaaggcttgtgccaatgtctattttaccatctcctgaccaacaaaatgaacaactattttcaaactcaatcatcagcttcatcaagaagtttcaggtgatcaagctgttgagaaaatgtggcttccgcaaggaaaaaggcattagcctgttcagcttgtttctttacgttttaagcaatgtctttcgtgaccgcagcttatatatgcagctgaaaatggatcattttcaagaaaatttttccaagaactcatattaccgttttatgcgcaacgttcacgtcaattggctccacttcaccacacttctgtctgcgcaaatcattaataaccacttgcgatctttgacttcagaaaaacgggctgattgctttgttgtcgatgattcctacttctctaggaccggcttcaagaaaacagaattagtcgccaaagtttttgaccatgtatcaatgacttacaagaaaggttttcgcatgatgaccctgggctggactgatggagcttctttcatgccaatcaattcagtgctgctgtcttctcagaagctacagaatatgattggcgaaaataaagtttttgatcagcgcaccattgctggccaaagacgtatgcttgcccggactaaaggcacagacgtgatggttaatttaatcgaccaagctatgaaagcaggtcatcaagccaagtacgtgctgtttgacagctggttctcaaatccacatcaaatcgtccagctcaagcaaaggaagctggatgtgattgccatggttaaggttagctccaaaatcaaatatgaatttgagggagaacgcaaaaacatcaaacagatttatcgcagctgtaaaaagcgatgcggccgttctcgctacctgctgtcaatcccagtcaaagtcggacgccaggacaaagacggtgctaaaatagatgcacggattgtctgcgttagaaaccgtgccaatcgcaaggattggctggcaatcatttgtaccgacatgtcgcttagcgaagatgaaattatccgcaactacggcaagcgttgggatattgaggtttttttcaaaacttgcaaaagttatctaaaactaagtacggaatatcatggcctgtcttacgatgctttgaccgctcatgttgccatagtttttactcgctacatgcttatgtcagttgccaagcgggacgatgaagatgaacgcacgctaggcgagctgttctattgcatgattgatgagctggcggacattacttttagccattccttgcaattgattactgatgcaatgctggccagcgtaaagcaagtctttcatgccagtgaagcacaaatagctgaattcacggctgactttatcaatcgtttacccaaatacatgcaaaaattgttaaagaaaactagcaaaaataatatagaagcctaaagccaagcaagatcaagagattactggcttatttagtgtgggaagtttaagtcattaattttaggacagtattcattatatgatttctttcatgcaatgtttaatacttatttttagtgataatgcataacaaaaatgcatagcagataaacgatttagcaaaacaaaaaaccgctctagaacaacatctagaacggttatctatggagatgaggggaattgaacccctgtccaaacgcatctcgtcactgacctctacgatcatagttatattacttgaacttcactagctcaaaacgccatataacagggctagaatgggctagctaacctgttaagactctttttaactattcaggtgaggtagttaaacgtaactcgctaaagttgatactcggtgtcagccacgagtaaaccgacaaggagcaacacatgcgcttaaattaagcagctaatgcgtaagaatttttgttatttgcagttatatttaactgtaacgtttttacgtagtcgtaacctacgaaccgcagtcaatgcgggtctacgcctgtcgaatcccaaaacatccccttgagatacttattcattatagcatagacacacattacatgcgataaaaatgcttaatcaatattagtcaaacgtaccacatcacgttcaatcatcaattcttcattagttgggataaccattcctgcaactttggaatctgtttttgtgattagtccttcactaacactttcattagcttcattatctacaacaacacccatatatgcgaaagcgtcaagaaccgcttttctcacaccagtatcatgttcaccaataccagcagtaaagataattgcatcaacgccgcccatttcggcaatataagcaccaacgtagcgaataatacgattaatgaaaatttttcttgctaacttagcccgttcgctatcactttcacgcacatcgcgcatatctggtgaaattcctgacaagcccaacaaaccagacttattattcatgatataaatcatttcatccatcgacttatgctctaccttcattagatgttgcacgagtgaaggatcgatatcaccggttctagtagccattgtaattccggcaattggactaaagcccattgaggtatcgtaagacttgccatccttaactgcagtaattgatgcgcctgatcccaagtgacagatgactaactttaagtcttttaaatctttacctagtaatttagcagcacgcggtgctgtatagcgaattgaagtaccatgagcaccatatttacgtacaccatatttttcataatattcataaggaagtgaatacaaataatgtactggatcaagattacggtgataagtagtatcaaaaaccgcaacttctggcacatttggtaaaacattcataaaagcttcaattccgcgagcctcagcaggattgtgaagcggagcataatctgacaattcgtagatcttaggcagattttccttagtaataatagtagaatccttaaagtactctccaccattaacaacacgatgtcctacaccgacaatttcagttagttcttcaacaacatggtatccttttaaaaacttgatcaataagctaactgcagcttcttgatctgggatttcagttttttcaacgtgcttagtaccatcagctaacttaatctcaaatgatgaatcttcaagacctacacgatcagccattcctttggcaagaaccttttcatctggtaatgagaataatttgtacttaaaagatgaactaccagagttaattgccaaaacttttttcataaaaattaattcctcttctttcaaaaaaataagtgctttatcaattaatgattaatctttgcataccactcgttaagtttaacattaaattgaattaaagtctcttcttttttcaaggaaccaagtttggtaagcaaaacttcacttgctttggcctcatcaccgtgattttggaaaactaaaactgactttggattaaacttgttcttaaacatatcatctggcaactctacaatcgccttcaaatagactttcttagttaaccatggcataaaatcagcgccaatcttgcctgacaaaatagacttaggaactaccaaaaaggcatagccgttaggctttaaattattaataatttgttcgattaacaacaaatgagcaaaagaatgacctttcttagcctgattttcaaaattcttggcattctcatcaactggataatagcctacaggtaaatcacttacaattgcatcagcgttaggacacatccaaggcattaaagcgtcttgatgatataactcaatgtcaatattattcagatgcgcagccacatctgtcaaacttaacatatcttcatcgttatcaatccctaccaattgataattatccttagaatgattgagtgccttaagttgagaaataattgaaaacaacaaattccctgtacccacggcaggatcaacgatttccatcttttgatcttttaataatttatgcatcaacattgctactactgtagcaattgcaggtggagtaggcatttggttaacatcaaagccatcatcattaactgcctttaaagttagaaaagtaaagacttgagccttttctttttggctaatttcgtcataatctattgcttgatacttttgacttaattcagccactgttttttcatccggtgcaccattttcaaccttaatcttgccactttctaagttatcaaaagtctctactaaggcttctgtaaatgaaacatttaatgccgtttgcaaagtttgcacacagtctaaaaactgattaaaaagtttttccaaattttccatagcggtccctccataccttaattattttatagaaagggataaagaggtgcaaggaaagtcaatcatccgttaagcattcgataattaggcgattgttctccatgctagcatgataaatatcttgatacattttgataaacaaaagcgtggtcattaaaactcaatgtcattaagttaagacattgacaattaagggtgcttttttagagatcgaatcatttggattcgatctctttttttgtataaaataaaggcgaaaagaccagccttttcgcctatcttatatattatatattttaaaccttcaaaattattgccagaaagatggtgttaattatgaaagcccttcataagaatattctagaacgtcttgatcaaattatcaataatactggggatcatattcacgattttattaataatcctcatgcttttaccaggaaacgcactttagatgcagcgacagtccttaaaactacaattaacatgcaaggtcagaatttaaacagtgaactctttagagcttttggcgaagatgcaactaaaaagaacgataaagtagttagtacttctgcctatgttcaacgcaaaagccagctttctcctgcttgttttaaacatattctgactgtttttaatcaaaatctatttaatattcaactttttgatcatcactaccgtttgtttgccattgatggctctgactttaatcaaatctggaatccgaaatcgaataacattgtacaagcttcttctcataaaaagaaaccctattgtcaaattcacgttaatgccttatatgatctattgaataatacctaccaggattgtatttttcagcctaaatcagaaatggatgaacgcaaagcggctgttcaaatgcttaaagctttgaattgtggtccatatattgtaacaatggatcgtggctacactagtttcaatatgattgaaaactgcaatcgcctgcctaactgtcattacataatacgaactaaggctggacaaggcggagttaaagaaataacgacattgcctgatcaagaatgtgatcgtgagatttcctgcctggtaactacttctaactattactacatcacgcataaagccagtgagaatattcaccatgtccagcatcattatcgccaatatattaagtatcgctctaaaaatacccaggatctaagctgggattttggcgagttatgcacaataaaatttcgagcctgcaaatttagaattaatgatgccaaatcaggcaaagaagaatgggaagttgtgctaaccaatcttgatcgaaaaaattatccgctaaaaagaattaaagagctttatcatctgcgttggggtattgagacctccttcaagaaattgaagtattctttaggcagtgtacagttccattccaaacaagataaatttattgaaatggaaatttatgcccatatgattatgtttaatgcaatcagtcaaattgatgcacaggcctatattccgcaaaagcattgcaagtatcaatatgccatcaatttcaagcaatcatgcttgattattcagagcatgtatttggcttcttctttaacgcaagattttgaacggatccttattcagatcagctattataccattccaattagaccaggccgcaaggacaagagaaatattaagcccaaatcagctgtatattatttatatcgcgtagcttaaaaaagcagaatctgtgctatgccttatttgttgtacgaaaaaagcaccaatttaaccaattaaatgttaaatcagtgctttaaaagtctaatattaattgtcaatgtcttaacttaatgacattgcattaaaactaatacactacttagtaaggcactgccttttacgttatgcgtctttttctttggttttagcatttttcttttcctgttcctcatcaagctgaaaaactaaatctgatgcacccttatttttctctgttaccctaataatgatgctatctttagtggttttaaaagcagccttttcaacgttaaataataacggcatatagcctttccctgcaccagatactttaagtacgttctttttatagtattcaattcggtaagtagttgcatcgcctttttgatcgatgcacttaaaggaagcactattacttatagctaatttagttactggatacactgccttaattttgtcagcccgcataaaattttctagctgtacataagcataggctacttcattgacatgctgattttgattcaagtttgcttttttaacactcaacaataaattttgtaaaattagcagcaccatcatagtaataaaaagcgaaaacattgcttcagctaacataaaacctttactctttgaccgcaaaagtttgtttagtcgttgcatcccaaacatgattacgtcctgccttttgataaattcgatcgtgaactgttacttgctccaggtcagttttagtcagtatatggtaagcataagcacgatctgtttttaattccatctcacgaccatttttctgattttcagctacagttatataaaagcaactaacagcaatcacagcaattataattgctataaagctctcaattactagaaatcctttaacttttatcattccgctactctcccccacagcatttgatatttcaggcttttttccattccgtagccactaaaagtcaccgtacctggtttagaataaccagtcaggttgaatttaaaatgatccaagccagtaattttgatattttgatcaactggaatacttttgtgatattttccgccagagaataaaatttgattggatttagctagatatgatacgcaaatagtaacctccttgatcgtactgtacctcgaagtttgatcaagtgccgtcgtaactcttttaacagtattatcaaaaatcagtttttcttgatatctttttaactgcaaactaccaatcaacaaaatgccacagcaaacaccaagtgtaattattacttctagtagggaaaagccggctaatttatttcttttcaacgacttcgccactatctaacgtgaaattctttttagctttagtaatttgatcaccagttaagtaatcgtccttttttagatcttcaaaatctttaggttcaccatatttatccttatataactcaacttgcgtttgcacagtagtcctaaatgcatccgcagttttagtttcagcattcttcttttgattaatcaaattaggcacaattagcaaaatcaaaatcacgataatggcaattaccacaaccatttcaatcaaagtaaaaccctcttgcttgcggcgcttagccataatgtttgctaaatacttcttcatcttctctttcatttttaacttaatcctcttcttcactctatttttttacttttatctttaatgtcactttttctatagtccttgcatcattgaatacattggtaataacagcttcaaatacattccaataatgcataagccaattaaaataaaacaagctggttgaacattgacgactaatttctcaattttttcagttaaatccaaaaataggctacgtcctaataacaaacagcgcttactcaagctctttcgctcagagccagtctgcaataaaactaataaactattaggcaaaaaatcctctgcattaataatttcttctaaattttttccttcagctaaatcgtgccctatcttttgtcccagtgcttgctgcaatgaacctttctcttgatctgccgcatattcgcacattcgctgcaatgaaaagccactagctagcagcagtccaatgtcataaaccaacaaataatgaatatacagcataactacctgcccaattaacggatatttactcagttttttcattgatgaataatcctgtttattgagcaaagtaacgatcttagcaaaaaaatataagcccagcaatacaataatgatcagaccaatcatgaccatatctcctgaatgatcactgctatcgctgaattgtgtcgaaataaacgattgcataaagaccagtaaaatcaccatcattatcgctaaaaccaacggataagataattcagcccgcagttttttcatctgctcctgttttagtcgattcaacgttgctaaatgctgcaaacattcaactaggtttccttgctgtaaagccaaattaacctgagttactgtcgttttagaaaagcctagtttaagcagttcagtactaaaacttgctccttctttcatgcgactagccattctttccatcaactgacacctttttggccacaatgccggcattaattcaattgaattgagcaaagaaaaaccattatctaaactatgttttaaataatccaaaaaggccaattgttcttcgccatttaacttatcctttttggaattgccaatatacttcatgattaatttctcctcctttccacaaacgctctagattttcctgccaattaacgaattcaccacgaaccgatttgcctagctctttttttagcaaagaatctgctgcaatatccatcaagcactttaattttccttgactgactaataatcgctgatacgacactgcagttagacaatttgtcagttcgtcacacctaatacctaatccctctagtcgagaaatagtttgcaaagtacttttagcatgaactgtcgcaaaaaccaggtgtccacttaaagctgcatcaactgctaaacgtgctgttccttgatcacgaatttctccaataattaaaatatctggacgatgccgtaatgccgcctttaacaggttttggtaatcaattcccgcttcgttattgacttgtgcttgcaaaaaagaagactcatgaatttcaacaggatcctcgattgtcatcactactttgttttggctcattttcttagcaatttcatacattgtcgttgtcttgcccgagccagttggaccactagtaataatcaatccgcgactcttagccagcttttcaattgttcccagctgctctggaataaaatattgactatggtcaatcccatagatgactcgaataaccagtgactcttgatcggaaaaatctcctaagctagataaacgcaagaaatattcatgtccttcattctcatatgtcattgcgccaacctgcgggcgacgatgttctgcaatatccatctgagcactgtacttaaaaaaattgataatttcctttcccgtctccaaagtaaaacctgcatattcaattagacccttaccggtccgaaatttaaccatcaagttttcttttttcgggaaaaagaaaatatcacttgctttaactttaattgcctcaatcaataattcactgacaatttctttgatcttcataaaaatcctccttttttgcctcacattatttattacgcaaaaaaaatcgatttttttgtgagaaatttaaaaaaacacaaaaaattttctcaactctaaaaaacgttgatctaacagcatttcaagattaaaaaaccattaaaaaagtacacaaaaaaaatagcttagccattggctaagctatttcatcattaactaattaatcttcatcagccgctgcagtataaacattttgaacatcgtcactatcttcaagagcatcaactaaatgttcaaattgttccttcttatctgctggaactggagtggtgttttgtggaatcatagttaattcagcatctgctagtttgtaaccatccttaattaaggcgtcacgtacacctgcaaattgctttggatcagtgtagatttcgtatgcatcatcactagtttgaagatcgtcaccaccagcatccataacatcaagtaatacttgatcttcatcagcatcagtagttgaacgatcaattacaatgtagcctttacggtcaaacatgtaagcaactgaaccagtagcaccaagtgaaccaccgttacgagtgaaagcaacacgaacgtccgaagctgtacggttcttgttatcagtcaaagcttcaacaaagactgcaacaccacctggagcataaccttcgtaagtaatttcgtcgtagtgttcttctgaaccaccttcggccttcttgatggcacgcttgatgttatccttaggcatgttgtttgaacgtgccttatcaattaccatacgtaatgtaggattcccatcaggatcaggaccaccactctttgcagccatataaatttcacgagataacttttggaaaattttacctctctttgcgtcttgcgcattcttgcggccttgaatattgtgccattttgaatgtcctgacataaggatccttctttcttttttctaatattaattaacgatattatcttaactcacagcacctcaaaattcaatggtgtcaaccatttaaacttgttttttctggtcaaaaaatctgtgtttaataaacaatactagcattatcagcaaaattgccgttaatgctcctgctccatcaagcattacatcatgcacgctcggtgttctatcacctgttaaaaattgatgatattcatcaaatacagcaaatgcaattgccataaaccaagttaaaactggtgctacccatttgattttgaaaattcttcttaatcctaaatagccaaaaccacctagtaaaaaataagaaccaaagtgagccattttacgtaaaacaaattgggccagccctgctcgaccatcaacttgcacattgtgaatacgaccaccgtaagtaaaatcccagccagcaacgatattctctaaccagccaaaataacggttaattttattgtcatgaatttcctgctgttgataagtcattgaactagaaatgaacaatgcaactagcaccaataaagcaagcagtaaaaagattttttctcgtttagtaaaatgaaatttatccattgctatttcttctctcttttttacttcttactttaacaaaaaacgggttaaacttgacccgttttataaattatttaactttgcttaatgcttcatcaattggtgtgtccccatcatgcataataattacttgatgaatcgtattatcatactttaggctatcaaccaatacctgagcaacatcatcaatcgaattttctccaccttctggagtaaatgatgtcttacccgttgctggcttctccattaagttacctggttgaatgatcgtataatccaaattagtattatgaattaaccattcatcagaaaagtacttagcaatatcataatcaataatgcttgcaagagaaggaatttctgcccacttgtcttggtcaagcgcaaaggcggagcttagttgaacgtaacgcttaacgccattagcttcagcagccttcatcagcttaactgcgccatttaagtcagtttgcaataagtcctttccacgagaacctgctacaaaaatcactgcatctgggtgacctaattcttcggtcagcttattaagcgaatcatgaaaatccaaatgttgcacccgcatattaggagaaataatttcaacagtattttctcttcttgcacctgcaattacttcatagccttcatctatcaatcttttgattacttctttgctcactctgcctgtagcaccagctacaaaaactttcgttgtttttcctttctaccagctagccttcttaacacctggaagttgacccttatgagctaattcacgcatacattctcggcataagccaaacttccgataaactgaatgcggtcggccgcaacgttcacagcgcgtgtattgtctagttgaaaattttgtttcttttttgttacgaataatttgtgatgtttttgccataaatacctcttatctgcgtctatttattctttgaggcgctggctttcttttgctagttaatagtcccaacgccaaaataataattccaattgccaatacttgtccagtcattaacatccccacctttctttttgactcttactttttgttggtgtattatacatgcttacctataataagtaaagagatttgattgtaaatagaaagcgttttacactagtctgatacattccctgtcaagtagacagtagaattacataaagcttttattcctcagttgattaataatcagctgaggattttttggcttctcttattttcttttcgtgtattttttgccagtatttctcaattcgatgatttggtgcaatagggcaattcttaatattgcctttcatcgcttctttgcgcatttcaccagcagttaaaccgttaaaacgtttctgtggatcttcattaatgtagtaatctattgtcttacaaatagaatcattaagttcatcataactggccacttgaggatgaagaataactcgcatttctttgataatgccttgccagccttccattggaccattatcaatacagcagccaacacgagacattgattgcgtcatgccttggtcttctaattggttttggaaaggtgcgcgagtaaattgaaaaccacgatcactatggaaaagcggatgagcattagggtatgctttaacagcctgcttataggctgcttgaactaaagcagtatcgtttcgtttactaattgcgtagccaacaggatagcgatcatatagatcaaacacagtacatagatatgccttaggcaggttagcagcaacgacttcagtgatatctgtacaccatttttcattaggtctagatgcattaaagtctctttttaacttgttttcggccgttttctcaggcgttgtatgcttgaactttagcttctggtatctaggcttttgtgatctaatgccattgatacacatcaagcggtaaacagttttatgataaaccggcttttcatcagacatctgtcgattaactgccatggtcatcttttccgtcccaaacagactgttgttagacttagttatttcaatgatctttgcttcaatctttttgtctcgttcttcacgcttactcggcttgcgcttaggatcaaagtatttgtaataagctgagcgtgctattttagcccatttgcacattaaatcaatcttccaattgtacttttgatggcagtcatggattaactgatatgtttcttgtttccagcgtctttttattgcggcttgtctgtatcttggttgtccggcaagcacatcctttctaactgatctaatttttttaggaattcgttcttagtttgttcttctttgagctgacgctctaattccttaatttttcgattagccagttctaactcagttagctcttctggcttcttatgtctgcctcgtttatctgttaatcctgtttcaccattagctagatatttgtgtgtccagctgtaaacctgctggtaagaacaatcaaatttgacagctgtttgagtgtaattcttgtcgtgattaagacagtattgaacaatctgaattctttcttgctgggtagtttttcttcttgctttagtcatatagacctccggatggggatcatagtcccgattttctatatgactattatacttggaaacccattctgatactgttccattgcttctaatgccatatttattagctaaagaaggtaacgacattttgccagctaaatattcttgaacaaccttttctttaaatgccttagagtaatgattattgtattgagcattacttagaagggtatcacgattgctttgatattgatgaacccatcttcttacttgcatcgctccacttttacttggcatcttaagccgtttagctatttcaacgctgctcctattaccattcaagtattgttcaactgcccatatcttttgatcgaatgaatatttactttttctggacataaaaaatcccacctccatggataattgaatactttatgtatttaaatcgtccactttagtgggattgtatcagtcacagttctttttaataggtaaaatttatttgaatactttcatctaagaaaggaatagaatgaacgaaaaatgtaaaaataagtcgccaggattcttatctttttagggagtaattatttttaaatagagaaggatgagaattaattggacgatttaacatcaacaaataaaatgaaagccatcacttggcctgttttgaccttgatggcactttgtactgttatcggcttggacgatatcatgtacaacttccaaaaccaagggatgccagttatcacctcttggattatcatgtgtttgctttatgtaacaccttactcattaatggtaggacaattaggttctacgtttagtgaagaaggtggcggactttcatcatgggtccgcggtactgacggagaatttttaggttacttcactgcttggacatactgggcagcctcaattccttatgctgtagactccgctaacgaaatcattgtcgacctaggttgggcattgaccggttcaaagggattccaagataaaattcctactaccatgtttgctgctttgactttcgttgtgttcattgttttcattatcgttgaacaccactttgccaactcaatggaattcctttccagtattggtggtggtttgatggtcattatgactgtcttgtttgttttccttgcctttgttggtttggcaaaatcaggcggtcacatggctacccaaccatttacttggcacacaatcattcctaaattcgacttgcactactggtcaaccgtcggaatgttaatctatgccatgaatgggtgtgaactggttgcaccatatgtaactaagatgaagaaacctaagtcagacttccctaaggcaatgattactttagctatcatgactgctttcttaactatccttggttcatttgcacttggtatctactttgacgcataccacattccaaacgacttgaagatgaacggtgcttactacgtattcgacatggttggtaaacaattcggtatgggtaaattcttgctttacctctgggcttggacatcattattgttcaactgtgccttggttgccgtattgcttgatgccatgactagaatgcttatctccgacactggcgataagtacatgcctaagttcttacgtaagaaggacaaaaacggcttaccaattaacggttacatcttaactgttgccctttcatcattcatcatgatcttaggtatcttcttacctgacatgaacgatatcttcaactggttgcttaacttgaactcaatcatttcaccaggtgttacctgctggatcttctactcattcatgagagtaagaaagaactcaaagaagtacccatcaaaatatgtctacattaaaaacgataaacttgcttggcttgttggtcttgccttgttagttgttactgccgtagcaaccatccttggttttgcaccacaagatgttaagcaaggcagtggcctttggtggtacgaattgatcattaatattgtagccgtaattgtcttaattggtttgggtgcaattttacctggaattagacgtcgtgaagaagaatacggtattgcttttgacaaatctcaatggatttggatgggaattatcattatcggttctattattcttgacgtatggcttggtagtaccaagattccagcaagaatcacaatgattatagttgaagctatcgctgcattaatcattacttggattgttggacgaagaaaaccccaacaagcaaccatataaaaactaaattacaaaaaagctcgcaaataatgtcattaattatggcatgctttacgagcttcttttttgctcaaattgatatcactttcactctatattctataatcatatagtaatttacaattattttgtaattttatatactcaacaaggttagcactaagtgttatactaaagtataatggagataaggtatatatttatagaattatttaaactgagactgaataaaatgaaaaatataagaaagaagattatagtatttctgctagccttggaatgcttagctttttgtatatcctttaatagcaaagtgtatgcatcatggagtcccgcttcagaatggaaagaaaatggctatcctactgaggactggacaacagatcaatttacataccatcaaataggatttattaatgatcctaaaaataatcaattgttgttatatgtagacatttgccctgattctaaaaccaatagaaatagtcatggatatgaaggtggatatcgtcaattgcagccatcagcctacaatataaatgttggtaatgctacatacagtgttaatttagatgtcaatccatggaatattcaaaatggaaaatctggatatgcaggaattggagtatgggatcctcaaactaatcaatataaagcaactaaagataatctctgtcattattatgcagatagtgatggccgccaatcggccataattaagattccttacaatatgtttaacagagatgacctaaacggatcaactaaaatgacaatgcaaaatcctaatttgggtggcaacacaaaaatcacaatcagcggagccagcaccggcccatacatccctgccatcatcgcttttgtcttagcttcaatagccgcaattagttattaccataaaagaaagttagtacgtcatgaacatcagtaaaatatccccaaaaatatttcattttggaaatggtgtcatccgtgcctttttctttggcttgattataattagcttcttcgctgtgctctcatctactaattggctgccagatgcaaaaactacgaccggcttaacttacataatgtttgcactactattaattttagttttaagctggttctcctttccaaagtttcaaatgttcttaaaaacaatttttatcaagcataaatggattacttctattatttgtttagtccttgcattaatttggcaaattcaatttgtctacttcgtacatcccgcaatcggatttgatgttagtgctgttcacaataccataatcaatccgaatctacctgaattaagaggatatttcagtgttaactacaacaacctatccatcctccttactctaagacaagttgccaatatctttcattcaaccagttggttaacaatggctttatgttcaacacttgttacagatttaagtgttttagtaatcatcgctacaattgcgataatcaattttcaaaaaattcccaatatcatttatattctagctagtctgcttagcatattccctatttgcatggttccttacacagatgtatggtgcttgctccctatttcactttcaatttttggctggagcatcgctacccaaaaatcatatctagttgtcattcgttttttaggagcaattttatccggaattagcttagcatgtggcgtttggatcaagccttcagttgctgtttggggtattgccgcgattttaacgagtttactctatattttaaaaaacaacaaagtaattctaacttctattttctgtttaactattgcagcaagttttgttttagcctatcaacctcttaaaaaagcggttcaagatcagcattacatcatcgttaatcaaaaacgccaaattccgatgatccacttcatcaacgttggtttaacacatgatggtgcctatgatccaaaagcagctttaaaaatggatgagcttcctactaagaaacaaaaagttgtctattctaaaaagatgatcatcaagcgtcttaaaaaacgcggtccattgggttatttacaatttctagttaaaaagcaaggtctaaatactgcagatggtacattcggctggctgcatgaaggccattttattatttccaagcagccatcagaaggctggcgaggattcttagcggaatttatctatccaaatggaaaatatgttattgagtttagatttatcgctcaaattctttggacaattattatttttgtattgctattcagttttcaaaaaggcggctttattattcaaacgctaagaatggcactagttggcggttttatattcttacttctttttgaaggcggacgtagtcgttatctagttcaattcttacctattatcttgattttaacagcactttcagcagacactgctaaatataatttagataaaattttgacagcaattctaccgaaaagaggtttttaaatatgaatcttagtttaatttaccctactatctctttaccaatcattacaattagcatggttgtaactcaaacacaaatagaaaaagtatgggagaaacagctagaagactggcgtcaccatttatttatcatattgtgttttactactttttacatactccaaactgtttgtattgcaaatgtaaccatctttacctttaaagcaattgcttatatgtatgtcattccaacaattatggtattacgcaacaagcaacatatttggtggtttttgctttttatcacaccactaattccgttacttattggtcttgatttaaagagatattcatttataaatatccccgctactttattgcagatttcatccatcgcattaatctgctttattctaaatcattgtcaaaatctttcatatcaagttaagtatatcattgccctttattcagggagtctcatccattttgtacgtctttatatagaaaatgaattacacctcacatttttaatcgctttgacaatcggaactactttcaccatcattggtgaaagctggcgttattattttgaaagtcgacatgaagaagcaattgctaaattgcattacgaaagcaagcgtgatgaattaactggtcttcttaactttcgcgcttttgaccaagaaatgaaaaatttatctaaaagacctaatataactaatacctatattggcgctattgatatcgatcattttaaagtaatcaatgatacctatggtcacttaaatggtaatattgttctgcatactttttctaaaaaactgaaacacgagattgataaagcttttgctcctaattgtttcgtttaccgctttggcggtgacgaattttcaattgtcatttttaatgctaatcctgaacaaatcatcgctgcactaaacaatgttgaacaatatttccgcgataattttatcaaacttcctgataataaaactaaaataaagttctcgttttcatgtggcttcacgaagcatttatctaatgaacatttttataacactcttgaacgcgcagatgatttagtttacaaagtaaaaaataatggccgcggaaaaatattgactgattaaaaaactaaggaaatgaataatgcttaatggatatttaattggcgggattatagtttggttatatgccctttcagtaactaatcgtgcacatttatttgctttttattattgggttggtgctattggtgcttttcttttaactacttttgcatgccacaaatattttgtctggttcctagctagcctagtgagccgcggagctggtgtgattggacagctgactcatagctttactgcttatccgtttccagctgctttagacattcaaactacttttggatcaattaccctattagttgactatgaatgttctggaattattgaaacattggcatatttaagcttattaattttctttcctatttacactcgtcgtcaaaaggttgctcttagcattatcggtgttttttggatctactttattaatatttgccgattaggtttaattgggataaccgttcattaccttaatttgcgaaccctgttctgggttcacgacgttataggacgtatctttttctatatctttacaattcttctatattatcaagtcttcactcattcacaattagtctcaaacttactagggcgaagcaaattagattaaaaaggaataatcatgtttgatcaaacagtattacaaatgggattctgggctacttggcttttaattcctgtcatatttgaagaaattccgatgataattaattttattcggcttcttcatcatcataaaattcgcaaaaaaacccctctgccagattttttgccagtattatcaattattattccgacttataattcatccaaaacactttatagatgccttaaatcgctagctgattcagattatcccaaaaatttactaggaattttcgttgtcgataatggcagcaaagatgacacctttcaagtctttgctaaagctcaaacggactatccacaattattgatgcggtggcttacttctcctcatggaaagtcttctgcattaaatgctgccatttataaagcaagatcccaatatatcattaatatcgatagtgacggtcggttggataaacatgctttaaacaacattgttaaaaaattctcggctaatccaaatatcgatgctttaactggaacaattttaaatgaatattttgaatattgccaaacctttctagcaggaagaaatattgaaaataacagcaatcatattttcacgctttctggtgccttttcggcttttaaacgcgagaccttaattagaacgtatctttacagtaccgatacaattagtgaagatactgacatgactttccaaatccggtacaatttaaagggaacgatttcattttgtgatgatgcaattttttattctgaaccaattagcggcttcagtgaactatatactcagcgacaacgctggcaacgcggtgaactagaagtcattaacaaatatttatcgcaagttttatcttggaaacaattcttcagtaattttcaaattcgtcgtttaatcattgatcacacagtcactttcctaaaaataatttggatgtttgctatttttatattattaggatttggctattcatggatatcattattgttttcttatgcggtaatttatcttttatatttatttttggagatttcgagttcaatttgtgtttacatatacttaggaagctttccagaagaaagaaaattttatcttaaaaatatttggatgatttttttactgcttttttataatttactttgttctttcattcgttgtgttgggattattaatgcttcaaccaccactacaacttggcaaggaattaatataattcaagaaggtcaacaggttaaccaaatcataaaaaaagatataagacaattattgaaaagaaaaaattatgacgactaaatatcatacttatatattcacaacttatttgaacgcatcacatgctattcgttggagtaaaggaatcgggcaggctcattcccatacttatgaaataaggtatagctttcatattaataacggcaaattgattcgtttcaatgaaattgaaaataagattgctgaaattataaaaaagtttaataatcaatttttaaatgaagttgagccattcaccaaagtaaatcctactttagaaaatttaaccgattatctattcaatcgtttcggcgaagaattaaataaattgaattgtagtttagatgaaatatctgtaagtgaatcaccaatgagaacttatcagatttcaattaggtaacagaggtaatagtaatgagtaagtggtataacgtttttcaacctatttatcaagtcgataaagatttaaatgtaacaatttcacattatgaaatgttattacgagatgaaaatgattccttcccaaataacgatttcttcagagtaattggaactgaagaagaaaatcaaaaatggattttagccgaaaaagagtcaatagatcaagcttttgctaagtaccctgatatctgtatcaatttaaacattgagcctattcaattcgcatacccaagcgtttggaaatttattgaaaatatttatagtaagtatggtaaaaaagtggtcattgaagtaactgaacgtcaacttcaagctggaaccttaggtaataaacaatttgataaatctttccaaagattccatgatattggcttggacgttgttttagacgatgttgattctggtggtcatagctttacttttgtagatcaccattctgatataatcagtgggatcaaattatcattactagacttcgatcctattagttctgatactactattaaatttattgatgcttgggctagctttgctaaggaaaaacacttagatctagttgtagaagctatcagaaataaggaaattgctcaaaaatttgctggtaataaacatattttccagcaaggttattactggcaacagggagtaaaactagaagacttaccaacggtttatggatttaagaagtaattacaaaaagacagaattgattgcttaattctgtctttttttacatgtatttatttaaaaatttgtttattcgcattttatattcatgcggataagtttcgaatgaacgcgcatgagctgcacttttggcaatccataactccttaggaccatttgtagcatgatagttttgatacaccattttagttggcacaaaattatcttttccaccatggataaatagcattggcttagtattcttttttaattgcttaactgcagatgcatcccctaaataaaagccaagatttgctttacttacaccgcttaatagcgtaactgcacttgtagctactgcttgcggcataccgtataaatcttttgcttcatgcatgaattcagctttcacatcactatacccacagtcttcaatatatgccttaacttgcttaggcatcttgaggccactagtcatcattgttgttgctccgcccatactgacgccaaaaattacaatctgttgttttcttccttcaattgataaatctttattgacccattttctaacgtcatatttttcaggccaaccatagccaatatacttcccttgactttgtccatgagcacgcgcatcaggaatcaaaacattatatcccaattgatgaaacatcgccgcatagggtgccatggtatttttattattaccaaatccatgcagcaacacagcagtcttttcagaatgcttatttggaatataatttgcatctaagcggtagtttgaagaagcagacttaatataccaatgctcttttttagcgtttttataccactttttattctgcgcaagtgaatctttctttttcttgctagaatatttattcagcactgtcttttcacctggaacaaaagcaacattaaagaaatatgcttcaactgctccaattaaaacgattaaaactgtggcgactatccctattatccaccatacttttttgcgttttctattcaaaatgtcaactcctatataaaataatatagaattaattatacacttttgaattttatatggtatattgacattttaagtaaaatattgcctatacaaaaaatgatggcttacgccatcattttttgttattaatctaaatcttcaccgtgagattcaattaccttcttgtaccagtaaaatgaatccttaggcattctcttaagagtacctttaccttcatcatcacgatcaacatagataaaaccgtaacgcttagacatttgaccggtaccagctgatacttcatcaatacagccccaagtagtgtaggcacggacatcaacgccatcttcgatcgcacgattcattgccttaatgtgcattctaaggtaatcaatgcggtaatcgtcatgaatcttaccatcatcactaatcttatcaacggcacctagaccattttcaactaccatcattgggatttcgtaacggtcatacataacttcaaggtagtattgcaagccatctggatcagttgcccaaccccattctgaatacttaaggtatggattcttagcaccagcggcgaagttaccgccaaccttatcttttacttcatgagttgtgataacgttgctcatgtagtaagaaaaggtgtacatatcaactttaccttccaacatatccttcttatcttgctcagtaatgtctaagtgaacattgtgttctttccaaagacgcttagcaaatgttggatacttacccttgcattgtgcatccccacagtagaaaatattttgttcccacatatggcggttagtcaaaatatcctttggatctggggttaatgggtaatcaacgattccacaaatcatattccctaccacataatcaggatcaatttcatgagccaacttaactgcccgagcactagctacgaattgatagtgcaatttctgatatgcatgttggtatgccttatcatcagtcacattattgccaaaagcactaagcatcaacagggttgaattgatttcgttaaaagtaagccagtacttaactaatcccttgtattcttcaaacaaagtcttagcatatttcacatacatatcgatcattttacgatcttgccagtcatgatatttttcactgaggtaaagtggatcttcatagtgagaaatagtaactaaaggttcaatatcatattttttacattcttcaaatactctgcgataaaagtcaagtccagcttgatttggcttttcctcatcacccttagggaagatccgagtccaagcaattgataaacggaaggttttgaaacccatgtccgcaaacatcttaatatcatctttgtaatggtgataaaaatcaatcgctacatggttaggataatattcattaggatcaattgcaccaactgccccttcaggaagtcccgcacctggaactcctggtgttttttctaacttaccatttaacttgtaagtcaacattctaggtgcatctaagctacctgcagtagtaatatctgttactgataggcctttaccatcttcatcatatgcaccttcgatttggttagcggcagttgctccgccccataaaaagttctttggaaatgacattatgattctccttttctgaaagcatttacattaattatagactaattggtttgaacttgaccagttgttttaacttctgcgttactgccttgcaaagacaaaatttcttgaccaactttaacttcaccttgagctacttgctgtacagattcatatttcttagaattcgtaacaacaactggagtagtcacttcatagccagcagccttaatttctttaatattaaatttaaccaatggatcacctgctttaacctcttgacctttttctactaaagtcttgaagcccttaccttgcagattaacggtatccattccaatgtgcattaacacttctgcgccatctgtagtgttaagtccgacagcgtgtcctgttgggaaaactaaagcaatcttaccatcagctggggcatgaagcacaccttcgcttggttcaatagcaacgccttcccccattgcaccgcttgagaatacttcatctttaatttctgacaatggttttacttcaccgtctaatggtgaaactaatttggttgaaggattttccttttcttcacttaaaattgcttgtacaggagcactcttagtaatattagctgcttcattagcggcgtcagcaactttttgtgcttgttttttattatattcagcatcaactgattttttaccaaagagcatttgaagtgcaaaaccagctataaatgctacaataccggcaataattacgccgacaattgttgtcattgatcctcccttaggattaatgtaggccggaattgcaaagaatcccattgatggcataatgtacaatactgaatgaaaggcaccaatgattgcacctgagactgcaccagcaatacagcttaaaacaaatggcgtttttcttggtaatgtaataccataaattgctggttcagtaacaccgaacagtcctgagaaaaatgcaccagtagctgtttctttaagttttttgtccttagtttgacggataatagctaaaacaacaccaatttgcgcataacaaaccatgcaggataaacctagaattgggtcataacctaatgcggctaaatctgcagtagttacggcaacgattccccagtgaacaccgaaaataacaagtacttgccaaagagcacccattaataaaccagcaataattggactaaagttgtaaacacctgacatcactgcaccaattgcgtccccaacccaagtcattacaggaccaattactataaatgcaactggtaaagcaataatcatagtgacaactggaaccaagaacatttgcacaactgatagaatccactttttagcccagtgctcaataattgaagcaaaccaaacggtaaataatactggtaaaactgtagaagtataattcatcgtgataaccggaatgccaaagaaagtcgtgtgaatctctgaggcaaaagccgttcctttaaacaatgtacctagaacagtcttacttgcagctaattgaaccatagttggataagttaaggttgcaccaattgctaatccgataaattgattcatgtgaaatctacgtgctgcagttacccctaagaatactggtaagaagtagaaaatactatcaccaattgcatatagaatttggtaagtacccgatttagtagaaagccatcccattgcgcctactaaaactactaggcctttaataataccgccagcactaagtggagctagaatatctgtaaaaatgcctgaaatcaaagcaacggctttatccacaaagctagaattatcttcaacgtcatcatcaggaacttgtccaccgccattaaagccgccttctttgacaacagcatcgtaaacatcagcaacttcattaccaatgaccacttgatactgaccaccagctttaacaacagttacaacaccatctgtatcttttaaaacatcatcgttagcctttttttcatcctttaatttaaaacgcaaacgagttgcacagtgaacaacactggtcacattatctttgccaccaacattttgaatgatggtcttggctaattcatcatagttcttagccatttgcctttcctccttaaaataaaaacccaagctactcaaaaactaaagaacataaatgttcaacgtctttcagtaactcgggttcatgcctaatcttcttagtaacatacctaagtaacttagatatttaattatcttgacgactagttacgcgccaaatatgtaaaacaagataaaattcatcatctgaatctaaatcccatcccatttttgcatgtaagtaagtggtgatccgctccgccgtctcatacgctttgctatatttgattttcataaaacctagcattgcaggatcaagtgaagcctcctccttttgcttatttcgtaaaaatctaactaacaaaatgcgcaaatgcgaaacaaacctactatagttaaaggagctcgtatcaagttgcattgaatattgcaattgaataatatcgattatcccacgaatcaaatttgtaatctgaattgtttcttgtacttgagaaacatcactcttagcattaaccaggtgataggtcatcaaaaccgactcactctgcggcaatttaatctgcatctcctgattaattagattgaccacttttttagctgccgcaaattcttttggaaaaagattttgaacttcccaactattgttagcgggagctatatcaatatgatctttaattcgcgtaactgcaaaatcaatgtgatctgctaaagcaagatactgaaagtcattgaacttaatctgaagcagaggttcgaccagctgaagtaccttattagttacttcaattgttttagggtcaaagcccttaacttgatccacttcgtctttagtaacgaagcgacgttcaattttgctttcatcaacaggatcacttttttttagaccaaatcctacgcccttgcctaggactatttcttcttgaccttggttattttcaattaaggcagcactattattaaatgttttaagaaatttcataataattcaccaccttagcaaaaaaagaaaaagctatcacaaataatgatataccaacgcaacattatttgtaatagctaagacctgatcgtatcagtaatccgctcacttacagttattataatagccaatattgtaagcggtgtcaatataattttgtgaaaaaaagcaaaatattttacaatgaactaaaaagcgaggtaattaaaatgaaattcgttcttgcacctgattcatttaaagaaagcatgacagcaaaagaagtctgcattgcaatgaaaaatggtattcaaaaagttattcccaatgcacaaataattgcggtaccaatggccgatgggggcgaaggtacaactgattcactcgttgatgctacaaacggtcgaaaataccaaataaatgttaccggtccgcttaatcaaaaagtatcagcttattatggcatctcaggtgatggacaaactgcaatcatcgaaatggcacaagctagtggtctctcctatgttgcaaaaagtaaacgaactcccgaaacaattttaaagactacaacttatggaaccggcgaattaattaacgcagctttgaagcacaacgtcaaaaagattattatcggccttggtggtagcagtactaatgatggcggtgctggtatggcacaagcgcttggtgttaaattttttgatcaaaatcatcatgaaatcacccaaaagttagcaggcggtgctttagatcaaattgctaatattgatctttcttcaattaatcctcgtattaaagataccaaatttttattagccagtgacgtaaccaatcctctaactggacctaatggtgcaagtagcgtcttcggcccacaaaaaggcgcagatgatacaactgttaaaattctagatcaaaatttatctcactatgcacaagtaattgagcagactattgataaaaacgtcgcccaaatttctggtagtggtgctgctggcggcctaggcgctggcctgatcgcctttactaacgccagtattcatccaggcgtgcaattaattgcccaagaaactaagcttgaagccaagatcaaagacgctgactatgtttttaccggcgaaggcggaactgattttcaaactaagtttggtaaaacaccctttggtgttgctaaaattgctaaaaaatatcacattcctgttatttctttagcaggctatttagatcaaggtattgatcaactctatgatgaaggatttaccgctatatttggcattcttgctaaagcagaagatattgagcaagccctaaaagatggaccaataaatgttacccgtacaactgaaaatattgttcgtttaatcgcacaaaaataagatgagctcgatgcccatcttattttatttcgttaatttcttaattaagccttcacagccacgataaatttcattatacgctgtttcaaaatcatttgtataccaaggatcatcgacatcagcataagagccagcaaactctaaaattttatgttctttatgctctgggtctccaccagtaatgcgattcatatctgcgaaattttcttcatccatgcagattaaatattcataattatcatagtctgagcgagtcatttgactagcacgatgaccacgatcatatggaatatgttttgcaactaattcccgttgtgcacgagcatcaatcccatgacctaaagcatcctgcgtagttgctttagattcagcagtatattgatctgctaggttattttcttttaacaaatattgcatcacggcctctgccattggtgagcggcaaatattgccatgacaaacaaacagaatttttttcattaccttttcttcctcttagttagtctatttataaccggccaaataatcgccgtaataactccaactgttaagccaacccaaatctcctgcgacaaagttacaagaatgccactataaactcgactttgcaatgcggtcatcgcctcatttgaggcaagccacaatgccacaaatgaagcaatagtagctagtgctagtggaattgacgccgaagagcgaccaaataaaatcaaaattgcggctaacaaaaataacaaagccactgcaaaaattgaatactcataaattgtaataatatggttcacatcttctgaatcttccttcaatttatgattaatttgcttgactaaatattcattgataatttcttccaacttacttttactagttaagcctaaatctttagtggtcaattttccctgatcattatatttttcacacaatctatatagatcagcatatgataagttaacttgatatttcggcggcaattgttctaacaatgtcttttccaaaccagatgcttcgagtaactcaacccctgccttcaaattaggattatctgagtcatccactactcgattgattacttctttgcccatcgcctgtgtatcgtttatttttaaattcacattgctagtcattaataaccaaaaagatactgcggctaggccgaccattatcaaacgtagtattattttgacgatgttcttcatctaaaaatcttcccctaacatctacttttttcagatggcaaacaattgcaaggcaccatgtcaggagcatccttttctttcaatttaagttcttgctgcatcgtcttaatatcgcccttagaaagcggtgcttcttttagcaactgaattaatacctcacccttgtgcatatcacacatgttttgcatcatatgtaaagtaacttcagacatcattttgcgctgactaatagtcggcttataaacaaaacaccggccttctttacgcgtctttagcaagcccttttgcactaaacgccgcattagcgttttaattgtggaatcggaccaatcctttttaccttgtagttctttgattacttggccagtacgaacttctcctaaggtccaaataatacgcataacttcccattctgattgggtaatggaattacgatcgtctttagtttctgccataaaacatcacttctaaatccaaattttttactaaagaacaaattttttcaaagcctttgcaatcccgttgtgatcattatcatcagtaacataatcagccttatctttgatctcactaatggcgttacccatcgctactttcatgaagttgggattagaaaacatcgaaagatcattgccttgatcaccaaaaatcatcacgtctttttgggcaatttttagccgtgaagccaaatccattaaagcattaccttttgaagctcccaaggcatttaattcaataatactgtcaaaactgcgaacaatgtcataagtctgaaaagcccagtcggggaaactattccacagtttttctacctggtcagctccttcagttgaagtaaaaccgactttgttaaaagtaaaatcttttggaatttcttttcggtctctaactttcataatattatcggtcaaagccgcattaatttgcatttgcacagataaatcccgatcagttgtaatgaaatacttagtcgtctcaaaatgtacatttacatgacttaaacgctgaaaacgcaacatattattgaagtcttgataattcaattcctgactcattaaaacacgaccagaaattgtttgaattactgcaccattaaagacgattgcatattgatcatcaccttcaattcctaattgcttagcaaagttcaatactcctgataatggtcgtccagtagctaaaacaaccttaatcccattttgtactgcgacacgcaacattctttgcgtttctggcaaaatagtattattgcttgataataaagttccatctaaatcaaccgcgatcaatttaatagccattttaatccctcggatcttaaaaattacatctagcattaattatacaaaaagccgtgatttaactcacgactttttacttatcgattattcaattaggattttacttacccatttccttttcgaccactttaacgatacggtctacataggcatcagtttcttcttgagttggtccttcagccattactctaagcaagtcttgagtacctgatggacgaacaagtacacgaccatttccagccatatccttttccactgcagcaatttcatcaagaattggttggtgttctttccagctcttcttgtcagcaaccggaacattaactaggcattgtgggtaatctttaaagtctttcaaaagttcacttaatgacttaccagtcttcttcattacgagcattaaatgcaaaccggttaacataccatcaccagtattatgataatcactcataataacgtgacctgattgttcgccacctagattgtagccgtgagcacgcatttcttcagaaacgtaacggtcaccaacttgggtacgaacattcttcaagccttctttttcaagagccttagtaaaaccaagattactcattacagtagtaacaatggtatctttcttcaaacgaccatgttctgccaagtatgagccgagtacgtacatgatgtggtcaccatcaacttcattaccattttcatcaacagcaatgcaacggtcagcatccccatcaaaggctaaaccaagttgagcaccttgcttaacaacttcttcttgtaacttttcagtatgcgttgcaccaacatgatcgttaatgttcaaaccatctgggtgagttgcaatagtagtaaagtcaacgccacaatcagcaaacagtcttgagatcaatgcgcttgaagcaccgttagctccatcaataactaccttaattccacccaagtcttctggaatagtattttcaataaattgcaagtatttagctgaaccttcgtggaagtcagttacagtacctaatcccttagcagatggacgaggtaatttatcttccttagcgtcaattaatttttcaatttcgccttccatttcatctgaaagcttcaaaccatcgctaccaaagaacttaatcccattatcttctacagggttgtgtgaagctgaaatttgcacccctgcatcggcgccttgtgctcgtactaagtatgaaagacctggagtagtaattacgccaacctcaagcacttcaatcccaactgaaagaaggcctgaaatcaaggcatattcaagcatttggcctgaaatacgagtatcacgagatactaataccttagcttgttcgccgtcttttttgttcttagttaaaacataaccaccatcacgacctaatttaaaagccatttctggagttaagccttgattagctacgccacgaacaccatcagttccgaaatattttaacatttaataaacaacctttctcaaattaattattcgcattctttactttaattgatatctgtacattttcaggatcaacgcgagcaactcccttaggtaaaactaaagggtaattctttacagttgaatatgagattcctttcagatctacatcaacatccaactgcttaatctttgctaatgtttccttttgtccatacagtgttacctcatcattcttggcagtaaccgaatagactttattatttttttcatttttaggctttaaatttagcttaactttctttttgaaaagcgatattggcaaactagcttttactgtagatggattaatcactgcatttaattgacgcccgtttttatcttcagctatcaaaataacttgacgctcataatcatgattaatgccattaggtaaaggcaacttggcaacgatctgatcaatctgatttacttcgcttctagcaccagtaacctcaacttgctgcggatcaacactagccgtaccaatattatatccattagcaacagcatttttattatactctatttgaacgggcatggtacgagattttcgccgttcaatatcaacattaactgttgccgggttaatcgtgtaagataattgactatttagtcccgtaacttctacctttacggtttgcttacctattttcttatgagttagatcaatataagcacggaagctttgagtattaacagtcgaagtaaccaacgcattcgaaccctccaaagttatcttaaccttttcaggataaccaacaacatagtatttatctgtattaaccgaaacttgcagaggaacactaattgtctgcgtttcattagcagtttgccgtgtcttcttagattcaccctgtgtaacaaaacctgtttgagtagagtcaatgtaaaccactaataagatcgcaaacagcaatgagattattctgattacccagcgtttatcccaaaagtctttcatcgatctgcaccccatttccagactttattaatcacacgacgaatccatggaaccttcttctcttccttaggaacaagttgagcattcaaatacttcaaatattcttcacgagacaaatctactaaaaagcgcccgtttctagtaatagttacgccaccagtttcctctgagacgacgatcgttaccgcatcggtaacttcagaaataccaacggcagctctgtgacgcgtgcctaaacgcttaggaatcatgctgttatctgacagtggtaaatatgctgctgcaacagcaattcgattattattgataattaccgcaccatcgtgcaacggcgtattagggataaaaatattaattaataattcaccagaaatatccgcatccagcttgattccagtttcaatataatcatctagccccgtatcttgttgaatcgtgattaaggcaccaattcttcttttagacatgtattgaatcgctttatcgagctcctgcaccatcttaaccgactgtgtatgagcactctcacctcggccattaaaaatcggcgtgcgtcctagccgctctagtccacgacgaatttccggctggaaaataacgataattccgattactgcccaagaaacaatttggtccacaatataagttaccgcatgcagttgcagtaagccggcaataattctaacaataaagataaagacgatcccttttgccagttgtactgctttggtaccacgaatcatcatgatcaaacggtaaactaaataccaaatgattaaaatatctaaagcaatggagaaattattccaagtaaacagattagaaatattaaaatgcattgattgctcctttcttctttaattataaccgccccaatttaccgtgcatacattttaaattctaaaaataggtcattatattcttgggtcttcttaggacctaaatctctaaagacctgtagattcttcaacgtactttgagtaggataaaactgccggtcatctctaacttttttcggcaataatttttgggctgcggtatttggggttgcatatccaacatattccgcattttgcgctgcatttttaggttcaagcataaaattaataaacttaagtgcagcttttttattttgtacagttttaggaataacaaaattatcaaaccacaaatttgatccttgcttaggcacaacataatgcaagtgaggattttgttccatcatttcataagcctcaccagaccaggtaacgccaattgctgcctcattttgcactaggtacatcttcatttcatctgaaataatcgccttaatattgggtcccagactattaagcttagtttgtgccaaatgtagtttaatactagatgtggtattcattgaatatcctaaagaaaccaatgccatccccattgcatccctagctgaatcaactagtaaaatttgcctgcgatactttttactccacaggtcattccaagtcttaattgcccctggcttgacgaatttatcattataaacaattcctagtgtcccccagaaatatggcacagaataatcattattttgatcaaatgacttatgtaaaaaactcttgccaatatatttcaaattaggaatttgcttttgatccaactgatcaagcaaatgagccttgcgcattttagttaccatatactcagaaggaatggtcaaatcatatgccgttccgccttgtttgattttggtatacatcgcttcattggaatcaaaggtctcatagacaacatgataacctgtctgcttttcaaacttttttattaactttggatctagatagtcgccccagttatagataatcaagttttgtttatttttcccggtagacgatttctccaaatgatgggataaaccccaaaggcctgcacaggcaattaaaatagctgcaattgccatcataatctttttcatttaactaggcctcccatcacacgatgatttttctttctgccctttttagtagtaataaaataatagattcctacaagcaacaagacaaaaatgaacattacggtacttaaagcattaatctcaagatcgattccttgtcgtgcccgagaataaatttcaactgaaagagttgaaaaaccattcccagtaacgaaaaaagttacggcaaaatcatctagtgaataggtcaacgccataaataaaccggaaaagatgcctggcataataactggaattaaaacatcactaaaaacctgccatgaattcgcccctaaatcacgtgctgcatcaataagcgacatatccatttcattaagtcgcggcaagaccatcaaaaccacaatcggaatagaaaaggcaatatgacttaacaatacagaaccaaaatttaagccaattcccaatgctgtaaaaaagatcaaaaaactagcaccaataattacatcaggtgacaccatcaagacattgtttaatgctaaggttgttttcttattagattcttttttcatcgcagcaattgcaattgcaccaaatgtcccaataattgttgctattaaactggacaacagcgctagtaggatagtttccaaaaatatcgctaataagcgattatcttgaaataaagtctgataatgagcccatgtaaagtgctcaaatttattcatgtttttaccactagaaaatgaaaagtaaatcaaataaaaaatgggtacatataataggatcaaagtaaaagcaagatagatcttagcgattaaatgtctgtttctcataaatctaccttctttcttctagcctttttgctagtaatcaacatgactaccaccatcagcgcgattaaaattactccaattgtggcccccatattccagttcattgtggtcataaaatactcttcgatagcagtccctaatgtgattacccgattgccgccgatcagccttgttaacataaataatgacaatgatgggataaagatggcctgaacgccgctttcaactcctggacgagaaagcggccataaaacatagcgaaaagtttgccatttactagcacccaaatcctcagaggcatgaatgactgcaggattaatctctttaatcgcattaaaaattggcaaaatcataaacggaatttcaatgtaagtcgccacaaaaataaaagcaaaatcagtaaacaaaatatttacgggaccaataccaaataaatgtaaaaatttatttactaaaccgtcattacctaaaatgccaataaatgcatatgctttaagcagcaaattaatccatgttggcaaaatgatcaataacagccacagctgctggtttttcattttaattaaaaaatacgctgccggatacgaaattaccaacgtcaacaaggtgatcaaaaatgcataccaaaatgagttaagcatcatttttaaaaaggtaccatttttaaaaaattcaacgtaatttctgagcgtgaatgcgttattactatcagtaaacgaataccagagaatcaataaaatcggcaaaatgacaaagagaataatccacagcagatatggaatcataaaaaacatctttttatttttttttcatccgcctcatacttttctagtcgagcatcaaaatcgtgttggctttcatttaaccgcatgacgtgaatatcttctggatcaaaaaagagcccaacacgttgtcccaatttaactccattagtagaatggatcagccattcattttcattggcatcaattgccttaatctcaaagtgatcacctaaaaataattgcgtctgtgctgtaaccacaatcttcccatcttctggtttaacaatatccaagtcttcgggacgaataactacttcaaccttttcattaggcttcatcccaccatcggcacatttaaatttattattagcaaattccacttcgtaatcatgaatcattcgaccagataaaatattggagtcaccaataaaacgtgctacaaagtcattcactggctcatcgtaaattgctaccggattaccactttgttgaatctgcccatcatttaaaacaaaaatttcatcactcattgatagagcttcttcttgatcgtgcgtaacaaaaataaaggtaatgcctagctttttctgaattgcccgtaattcaaattgcatgtcttttcgtaaacgtttatccaaagcagatagcgactcatctaatagtaaaaccttaggttcattaacaattgcccgggcaatagctacacgctgctgctgtcctccactaagttccgaaatttcgcggttagcgtaaccgtctagacgaaccatatgcaaagcatctttaacagctggcttgatttcactcattggtcttttcttaattttcaagccaaacgccacattttgaaaaacatccaggtgtggaaacaaagcataattttgaaaaactgtattgatatgtctttttgaagcatcaaggtcagtaatatcattaccatcaaagaggacttgaccactagatggctgagtaaagccagcaataattcgcaaaattgtcgattttcccgagccactaggaccaagtagtgaataaaatttaccagattcaatagttaaatttatatcttttaatgctacaaacccatcatcatattttttggtgatgtgttttagtttgataatatccatttccatccctcacataaaaaacagctgcaagccttccagcctgtagcttgtctttgctaaaatattttacttttctttgccgataatcctaacttctgtgcgtaagtcaatgtcaaacttttctttaattaccttttggatcaaatgaattaaattcaaataatctgttgcagtagcaccgcctttattcacgataaaacctgcatgtttcattgaatcttgagcgccaccgatttgtttaccttgtaaaccagctttaataatcatcggaccaacaaagtgcccagtaggccgcttaaagacactgccacaagatggatattcaagtggctgcttataacgacgtaaagcatttaaataatgcatatgatctaagatctctaacttatcgcctgacttgagtgcaaaagtggcgcttaatacaatatcgccattttcttgaactaatgaatgccggtaagaaaagttcatttctgcgtttgaatatgttttaaattctcctgctctggttaaaacattaacgctttgcactacttcttgcatctcaccgccataggcaccagcattcataaaaataccaccgccaatactaccaggaattccagcagcaaattccattccgctcaaaccatgatgagcagccgcaaaagctgtatcgataatccgtgcaccagcatcagctgtaacttgattatcttctactttaatctcttttaattcagtcaaaataattactaacccatcaattccgccgtcacggatgattaaatttgaggcattgccaataattgttaatggaatttcattttcacgtgtgacttttactaattgttctacttcatcagtcgtcttaggaaaggccaaatattcagctggtccacctgtcttagtaaaagtatatctgcttaatgggatttgctctttaatatcaatccctttttctttcaaatcaagtaattccacgctgttgcctccttaaagtttcttgttttattttaccgcataaaggcgttagcttcattaatattaatgatatacttttttaaaaggagaattttatgaattttattgcaatggactttgaaacagccaaccattatccagaaagtgcctgttcacttgctttggtaatggtgagaaataataaaattgttgatcgcttttatacagtaattaatcctcaaatgccatttgacgcgcgaaatattcaagtacatcaaattacagctgagggcgttaaaaacgctccaacaatggcagaggtctggccccacattaaagaattgtatcaaccaggaatgcttgtagccgcacataacgctcgctttgatactaatgtcatgcggcaaagcctggcacgttacggtattgaggagccccactatttggtcattgacactttagctagcagtaaattactcgaaccagaactgcctgaccacaaattagacacagtttctgaggccttaaacgttgaattgtggcaccaccataacgcattaagtgatagtgaagcatgtgctgggattttaatcaagcaagaagagcaatttggtgatgaagcaatcaaaaatttggtttatcagatatgaaaaatctctaggaattttgatcctagagatttttgctttacttattaaattcagttaacgcagctttgacccattcttcattgcgcttaccatgaggagtaaattcaacaacccgtttagttgaatcccaactatcgtccactctggtaatcgtaagttgcaaatactcatctggcaaatcattcattactagttgtggccattcaattaccactaaacctggttctgctaaatagccctccaaatcaatcgaggataaatcatcattttccaaacgataaaagtccatatgaaagagcggcaacttagcttctcgatattcacgcacaatggtgaatgtaggactcttaacaggccgatgtatgcctaatgctcgccctaatccttgagtcatggttgtcttgcctgcacccaaatcaccatttaatagtaataaatcgtagggctgggccgttttggctagggatgcacctaatttctgcattccatcagcagaattaatttctaactttgtcattacttttcatcctttgctaaagcttgtgcggcagtaacaattgctaaatcataaatatcttgttcactgcagcctcgagataggtcattcactggagctgctaaaccttgcaaaattggaccaacagcagtgaagccacctaatctttgaaccatcttataaccgatattgcctgattgtaattctgggaaaacaaagacattcgcatgtccagctacctttgagtttggagccttcttttcactaactgcaggtacaaaagcggcatcaaattgcaattcaccatcagctggaatttctggatgatccttttggaacatagctgctgcatcatgtaccttatcaaccattggtccttcggctgaacccttagttgaaaagctcaaaaatgcgaccttaggatcaatttcggccatcttggcagtcagagcagattgatagccaatttcagctaaagtttcttcatcaggattaatgttgatggcacagtcggcaaaaatgtaacgctcatcgcccttttccattacgaaagcgccggatactcgatgcatccccttagctgcatgaattaattgtaaagctggcaaaacagtgttagccgttgagtgagcagcaccggaaaccataccgtctgcttttcccatcttcaccaacatggtaccaaagtaattaccttgggctaacttgagctttgcttcagcaatactggtatcttttcgtctagctttaacaaattccgctgccatttgatcaagttcatcataatgattgaggtcatagatcttaacaccagctaagtctaaattattttctttaactaacttagcaatctcatctggatttccaattaaaattggttcgataatgccatcttttttcaaattagctatggcagtaagaattcttaaatcatcgccttctggaaaaacaattcttttcttatcttttgctgcttcaacttgttttttgaataatgaaaatacgctcattttttacctcttatgctaaatcagatttacttatcgtttctggcaattgccagtcaatcggcgtttcatcaaagttcttcaatgccatattacaccgcgaaaacggtcgcgagccaaagaaccctcgatcagccgaaaatggacttggatgtgatgatttaatgataaaattcttactttgatcaattaatggaatcttgttttgagcaaatcgaccccacaaaataaagacgacttttccacgctcactcagagccttaattgcagtatcagtcacatcttcccaacctttgccttggtgaccgttagcatgcccatacggtaccgtcaaaaccgcattcagcaaaagcacaccttgatcggcccacttttttaagtaaccgtgattaacaggccgagctccgacatcatcatagagttccttatagatatttttaagtgatggcggcaaagttgtacctggcatgacggaaaaactcattccattagcttgaccaggattatgatatggatcttgacccaaaattaccactttagttttagcaaacggtgttaatttaaaagccgtaaaaatatgatacatatcaggataaatttgtttagtagaatattcttcttttaaaaaattatgcaattcgtgatatttctcacttgcaaaaacaggatccaatacttgatcccaatcgttgccaattaattctttagccaagtcttacaccctcttttcttctcctctttatggtatcattaatttaatactaaatgggagagaaattatgatcaaattagttgcttgtgatcttgacggcacgttgtttaattcagagatggctgtttctgctgctaatgcaaaagctgtgaaaaatgcacaaagtagcggcattgaatttttaattgcgactggccgggccccacgcgaatcacgttcagttctcaaagatgctgatttgcataccagttttatcaatcttaatggtgccctggtttttgacgaaaatgagcaattaatgatcaaacacagtattcccaaggcaaaagcacaacagctagtgcatttactacatcgatcaggcttttactttgaaattttaactgccaatcaggtttatagtgaaaatctagatcaacgtatttcaaatgtagctcatttaatggtagatctaaatcctctacttgattttcgtcaagctgtagcaatttctgctggtaataagactattatgaatatgaaacaaatccacagtttcgataatttattgcaagatcctaaaatagaagtaatgaaaattattgcttttgactctcggggacatgaagcttttaccgatatcaaaaaagaaatcgctacaatgggcgatctagtagtaacttcaagttcatcttctaatattgaaatcaatgagcaacatgctcaaaaaggtcttgccttacttgattatgccaagttaaaaggtatcgagcctgaggaaatcgctgcaatcggtgataatttaaatgatgagagtatgatccgagcagcaggtactggcgttgcgatgggtaatgcgattccagctattaagaaaatagctcaggtagtcaccaagcgaaacaatgaagatggagtagcttatattttaaataaatttattgcagataataacaatatttaaagttatgaggtgagtaagtatgcgattttggctagaacttaatcaggaaaaggattacggtcaaattcctgtgcttaatcaaaatggaaaagctgaattttttattcaaggcaatcttgataatccaaaccacactttatatctaaataatttccgtaaacaggaagtgggacgtctgttttctgatggtgcgggcctaattgcttcgttcacaattgatgtcgtcaaccactctttagtaggcgtaaaaaagttaaacacacctactgcaaacatattctatttgacccaattaaagtatattgttacaggtagtattaaacgtggtacttatacttttcgttctggaatcaagagtgtagcaagtgtccaaacaatcatgggagatcgcggaggcgttttaatttgtgatattactaagcctgaagacgtcccctttattcttttgacatccgttctatttacacaatggcatgttacgcctttgaaactgcctagttttccgccaattggatttgaggtaaatccaaattaaacaaaaaagcagtcatgaaaattttcataactgctcttctagaaagtgatatagatatagatgtatcttctgccataaagtttatatttattaagtaataaggaattattaggcagagactgaataatgaaagttaaatctaatttgattcaacctccatagcttattatacttcgttcagccaaaaatacaagggctagatgttattattttactttaaagatagctaaataatgcatttagagctagcttatagcttaataatttgttatttaacttagtacatctatttttctaaacaagacaactttaatttctacgtaaattgcaataataaattgaacacttttaatcaagctgcttgatagattagatctaattctctttcaaagatttcatctggtgtatgatatgccaatatctttcttggtaaagagttgcaccaggtttcaatgtctatgatgtcttgtagtgaataattgtctattgcctctcccttaggaataaatctgcgaatgagtccattatgtctttcaacggttcccttgtcacaagatgtataaggatgagcatagtaaactaaagtatttgatacgtcttctaagcttgaaagatctgcaaactctgagccattatcagtggtaatggttttaaaaatatcattccaatgttcgctgtattgcctttggagttctttaaaggcctgcatgacactgacagaagtcttgtcaggaatacgaagaattaagaactcacgactcatacgttcagataaggttagcagcacctcatcatctttgctcttatgtccgagaactaaatcgcattcccaatggccaaactcattacgtttattgatttctttaggacgttcttcaatgcttctgccaagttttttcttatttctgcgaatacgatgaagcttggtattgcgtttaagcttctctggcaagtcgtaattatgtatatctaatagaccttggtcgacataattgtaaagagtcttagtacagacaacatctctgctgctaaatgcgccaacagcggtggcgcgattactgcacacatcaagcgaccagccgtctttaaagaaatgtttgtggacatagcgcatgaattgagttttcctgagaaagtctgatttacgtccacaatttttacgatgagcttgatatgcatcatgcccttgagtagccttatatcttttgactttgccatgatacagttctacagtaccgcgcttaacctcataactgatagtagaaggggaacagtttaattcacgggcaatggcacgcaaagaatagccatctttcaaacgcaattgaataataactctttcctcgaatgataaatgcttgcctttaatgtgatgattcatggtagaatgtaaagagtccattttgacctcgtttctaaatgttgtgtggtaactacattctatcaaacaggtccgaatggactttttattttttattaagtgttcaatttaattttacaatcagcgactttaatttctattaaaaaatatagtgaaatgatcaagtgatttatcaatggcttgatcatttttatttactttatcaacgaacttgtttttagctatcaaactatataaaaaagagccaaatctaatgatttgaccctaaaaattctagattattaatctaaattattttttatgaattagtcttggtagtttaccaattctaagaatgattctggtactaatgaagcaccaccaaccaagccaccgtcaatatcaggcttagccattaattccttaacgttagctggttttacagaaccaccgtattgaatacgaacgttttctgcagtttcttcgttgtacaagtccttaacagtttcacgaatagtcttgcacatttcttcagcttgatctgatgaagcagtcttaccagtaccgatagcccagattggttcgtaggcaataacaagtgaagatacttgttcagcagttaagccgtctaaagcagccttaatttgagcaactacccagtcttcttgcttgttagcttcacgagtttcaagtgattcaccacagcaaatgattggcttcaagccattagcaaagattgccttagccttcttgttaatgtcttcgtcagtttcgtggaagtaaccacgacgttctgagtgaccaataattacgtagtccatacccatttctttcaagaccttaggtgaagtttcaccagtgtaagcaccttcgtcttcaaagtaacagttttctgcaccgatatgtaagtttgagccttcagcagcttttctcaaagcgtcaaggtcaactgcaggtgcacaaataagtgattcaaccttacttgggtctggtaacttatccttaacagcgttaacgaattcagtagtttgttctggattcatatgtaacttccagttaccagcaataattggtgtacgactcattaatctattgtcctttccttactattacttgtctgaaacgcaagcgatacctggcaattccttaccttcaaggtagttaagtgaagcaccaccaccggtagaaatgtgggtaatcttaggagcaatgcctaattgcttagcagcagcagttgagtcaccaccaccgatgatagtagttgcatccttaaggtctgccaatgcacgaccaacttccaaagtaccttcagcgaagttaggcatttcgaatgcacccattgggccgttccaaacaacagtcttagcatccttcaagatttccttgaacttttcaacagtcttaggaccgatgtcaagacccatcatgttgtcaggaatatcatcaccaacaacttcacgtgaagcatcatttgagaattcagttgcggctacgttatctacaggaagaacgatcttgtcgccagccttagcaagtaattccttagcaaggtctaccttgtcagcttcaaataatgatttaccaatgctgtggccttgagctgctaagaatgtgtaagccataccaccaccgattaaaatatggtctgacttaggaattaagttttcgataacaccaatcttgtctgaaaccttagcaccaccaagaatagttacgaatgggtgtactgggttttcaacagcatcacctaagaacttgatttccttttcaagcaagtaaccagctgctgcaggcttgccagcttccttcatagcagttgcgataccaacgtttgaagcgtgacttctgtgagcagtaccaaatgcatcatttacaaacatgtcgccaagacttgcccagtattcgccaagcttaggatcgttacctgattcacgcttaccaaagtcgttgtcgatgtcttggaatctagtgttttcaagaacgataacatctccatccttcatgttgttgatagcgtcttcaacttctttaccttcgtttgatggtacaaaagttacaggcttcttaagaagttcacttaaacgttcagcaactggctttaatgataattccttcttgtcagcatctgacttaacacgacctaagtggctaagtaagatagccttgccaccgtgttcaatgatgtacttaatagttggaagtgcagcaacgatacggttgtcgtcaccaataacgccatccttaattggaacgttaaagtctacacgtactaagacctttttgcctttaacatcaagatcgtcaacgattaatttagccattataatcctccgattattttgatattttttcttcaaaaaaaggcggaaggaagaatctccctccgccttctcaattaccacttaactatataatcagttaattaaaattaatgattaaagagttgcaaagtgtaataaagtacgtaccatttggcaagtgaatgagtattcgttgtcgtaccaagcaacagtcttaactaattgcttgtcacctgcagtggttaccatagtttgagttgggtcaaagattgaaccagcagtcatgttaagaacatcgctagaaacaatgtggtcaccgttgtaagcaaatgatgggctttcgtacttcttcatagcttcgttaacttcgtcagcagtaaccttcttgctcaagattgataccaattcagtttctgaaccatctggaactggaacacgttgtgcgtgaccgttcatcttaccgttcaagttaggcaataccaagccgatagccttagctgaaccagtagtatgaggaatgatgttttcagcagcagcacgagcgtcttgttccttaccactacgtgaaggaccatccaaagtcatttgagtaccagtgtatgcgtggatagtagtcatagtagcaacttcgataccgaattccttgtccaaagcgttagccattggtgcaagtgagttagtagtacatgaagcagctgaaacaatcttgtcatcagcagtcaaagtgtcttcgtttactgagtaaacgatagtcttcaagtcgttaccagctggagctgagatcaatacacgcttagcacctgcatcgatgtgagcttgtgacttagccttgctagtgtagaaaccagtacattcaagaacgaagtcaacaccatcgttcttaacccatggaatgttttgtgcttgtggttctgcgtatacgtggtaactcttaccgtcaactacgattgaatcttcagttgatgaaacttcgtggttgaaagtaccatgagtagtgtcgtacttaagcaagtaagcaagcattgctggagtagtcaagtcgttgatagcaacaacttcaatgtcctttgacttttcgccaaggtccataatacgacggaatgctaaacgaccgatacggccgaaaccgttaataccaattttaactgtcataacctaaagtcctccttaagaactataaacaacatttattttaaacgggatttcatttcccctttaaaatcatatttgaggcgccctcatcagtgattagccaggtttgatgaggcgcattaggcatataagctttaattgcttgagcctttcgggcaccacaagcaaaagcaaatatgtggggtattttgtataggttctcgaactgcaatccaacctgggtgatgcggtcaacaaccttgccatgttcatcgaagaaacacccgaaacattcggtgacggctctcttctcacgaagttcagatagcttaattgaattatagcctctgcgctgtgccatttcttgagctaacccaataccatgaatcacagcatcactttgagaaatgtcttgcagaacatctgcgatcgaggactcacgaatcaaagatttgtaagcatcatctgaaacctgctcaggtaaatataatgtcttataagtacctgaagtcttagcagccatttcttggacgattgtattactttgcgtctctacattttcgcccaaagctcctcgacctggaacaaattccaactggcgattgttagctaaatctggtgataaatacttagcagatctagctaacgccgctccacctagaattgtaactattgaatggcctaaaggcaagagtaaattcaaagctgaacttaatttttctcccatctcctcatatactcggtcttggaaatccgcattaccagggacgatcaatgttctttcaatccctaattttttggctaatgctacttccgtttcaccggcattaaagaggcgatcaagcaatggtcctgcatcttttaatgttttctcacccttttcagttaaaaacatcccaaaactttttgtttcaatcaatcctaattgacataagtactcagtctcagttctgatgtttctctctgaaagccctaaatgctgagcaacactccgacgtccaattggcgcatgtagcgaaatctgctcaaggacaagatacctttgtcgaagaatctttaagacgtcgggaacgagcgcttcgagcaaagaaaagtccgaatccatcgttccctcctttccatgggacatctatcgaccacctacgtgtcgttttgtgtcccagaatgcttaaaaatataagagaaacgtacttttcattcaattcatacatttcccaatcgacactgttagtataacaatgtatttttcgtaattcaagaaaaagatacacgattttaaaaaagtcgtaaatcgagtaaaatcatttttatttcattactttttttgatatactaccacttgtgaatcatctgggcccttagtgtaatggatcgcacataagattccggttcttagaatctgggttcgactcccagggggcccatataactacatgttgaagactaccgccatctcggtattcttctttttttataccaaaaaagcattcctcacggaatgcctttttcaatatcacaattatttagtgcttgtagtcatcaactcagcacgttgtgctaactcagtgtacaaagttgagcctgaaacagataaaccttcaatttcacggcgagtgttgaaatgatggctacccttataagtaccatttgctgctacacggaagatgtagtcgttaaaaccaatatagaattgattgtggttgctgtcataagcaaaaccttgaactggtgaaccagttacgaaattactttgagtagcaccgatttcttctggagcccaagtgtcaccatttctagttaacttccagtattcatattggtgacgaccaccattgtggaacaatgcatacatagtgttgtcgccaacaaaggttgcattatggaagtaacgaggatatgcactgctgccgttccaggtcttaacagtccagattttgttaatcttcatatcactctttcttacttgcataatttcttctgaagctgttgaattagcagtcttattgttattagccaaaacataaatgtagcttgaagaagagccaagtgattgaccatgacctagcttaatgtatggtgaaactttaatattgtttgcgtagcttctaaaagtgctccatcccatagtagttaagttttgagcagcatatttactcttaattgcattcaagttgtaagaaacaagatgtcctcttgagtcgctactgctagtgtacatagaagctgtaaaaataccatcattaacagtaataccttcaggaattaccccaacttgtcccattgcatcagcagcttgaccatagcctaagctgacaaaacgtggttggaacaaacgagtgcgcaaagtcatgccgttacctgaatagctatttgagctagtttctgaacgataaccgtgtgcctgattccaatttcttgatgatccctttgagccaccattccaagtatgaactgccttaggaccactcttaacagaagcacctgcactagtaattccttcatttgtatctgaacgaacagttacattaacgcttgcctttgccttaccatatgaataatctaccttagtagtgccggcacggcttgaactaacagagctatgtgaaacattaaccctatctggattaattgcagtaccttgtccatctgttgcatagttaattgcatccctagttggaaaactgtagttgctgttgtgaactaagctaacatcttgagctactgaaatttggtttctagcaaaaaagttttgacttacccaacctacattgcgtccatcgacaataatgtaccagaagttacctttcttggtagaaacatacttcttagattgaatttgaccatgcttaaagtacttggtatttgaaaatgcacctgatggtccttttttagatacattatgataaatagcgtaattaccattgccagcaatcttagtaactgccttgctgtagcttttggcatctaccttgctttgactaatggcaaaaacaccaccaactaatgcagcactggccacaaaagttaataacatctttttcccttttaacatccttattaatcctcccatatgaaaaaatcacgttcattttagcacaaatttatcaaatgaaacatctaattattaaaaaatttcctgaacaacaagactttgaaaacgcttctgttatataattaaaaagttcacataaatatataaatagtaatagggagaaattttatggtcgaatcacaaaataattccaaaaagatgatgtggaccaccctagcaatgatggccttctctaccgtgtggggctttggtaacgttgttaatgggtacgtctactttgacgggacaaaggttgtctttagctggatcgtcatgttccttctctactttgttccttatgccttaatggttggtgaacttggagctaccttcaagaatgctgaaggtggggtttcctcttgggtaaatgccactatgggcgcaaaatgggcctactacgcaggttggacctactgggcttgccacgttgtttatatttccagtaaaggtactggtggtttaagagcgatggcctggggtatcttcggaaatacaaaatggtatgatggcttacctaccgcttggacacaatttgctacattagtagtcttcttgcttttctgttgggttgcaagtcgtggtattccagtattgaaaggcctagcaacaattgctggttcttcaatgtttatcatgtcaatcttattcatcattatgatgtttgccgcaccagctattaatccttctgctggtttccacagtattgactttaactggaagaatttgatgccaaccttcaacgtaaaatactttacttctctttcaatcctagtatttgccgttggtggttgtgaaaagatctccccttatgttaataaggttaaggatccttccaaaaacttccctaaggctatgatggctttagcaatcatggttatggtatctgctattttaggtacttttgccatggcattaatgtttgaccctaaggtggttaatgccaaccttaacgaatacatctctaatggtgcctacatggcatttgacaagctgggcgaatattaccatgttggcggcttgttcatgtacatctattcatggtgtaacgtaatcggtcaattctcaacattagtaatcagtatcgatgcaccacttagaatgcttttgggtagtaaagaagctaaagaatttattccaaagggcttattaaaactcaacaagcatggtgcttacatcaacggtatctggatggttgttgtcctctctggtggcttaattgctattcaagctttagtaccaaatgctcaagctgttatggcacaattagttaaattaaattcaactactatgccacttcgttacctttgggtatttgcggcatatgttgctttaagaaaacagcagcaaaagttcaacactacttatcaaatgactaaacatcaaggcttagcctatactgccggtatttggtgttttgtagttactgctgcatgttgtatcttgggtatttactcaccagatccatttaccttattccttaatatcttgacgccaatcgtcttgattgcattaggtttaattttgccaggaattaagaaatatcaagaagcaaaggcaaaataaaatttaaatacagaattttaaaaaggaagcaatttcaaaagactgcttcctttttagcaatgtcattaagttaagacattgacaattaagggtgcttttttagagatcgaatcatttggattcgatctctttttttgtataaaataaaggcgaaaagaccagccttttcgcctatcttatatattatatattttaaaccttcaaaattattgccagaaagatggtgttaattatgaaagcccttcataagaatattctagaacgtcttgatcaaattatcaataatactggggatcatattcacgattttattaataatcctcatgcttttaccaggaaacgcactttagatgcagcgacagtccttaaaactacaattaacatgcaaggtcagaatttaaacagtgaattctttagagcttttggcgaagatgcaactaaaaagaacgataaagtagttagtacttctgcctatgttcaacgcaaaagccagctttctcctgcttgttttaaacatattctgactgtttttaatcaaaatctatttaatattcaactttttgatcatcactaccgtttgtttgccattgatggctctgactttaatcaaatctggaatccgaaatcgaataacattgtacaagcttcttctcataaaaagaaaccctattgtcaaattcacgttaatgccttatatgatctattgaataatacctaccaggattgtatttttcagcctaaatcagaaatggatgaacgcaaagcggctgttcaaatgcttaaagctttgaattgtggtccatatattgtaacaatggatcgtggctacactagtttcaatatgattgaaaactgcaatcgcctgcctaactgtcattacataatacgaactaaggctggacaaggcggagttaaagaaataacgacattgcctgatcaagaatgtgatcgtgagatttcctgcctggtaactacttctaactattactacatcacgcataaagccagtgagaatattcaccatgtccagcatcattatcgccaatatattaagtatcgctctaaaaatacccaggatctaagctgggattttggcgagttatgcacaataaaatttcgagcctgcaaatttagaattaatgatgccaaatcaggcaaagaagaatgggaagttgtgctaaccaatcttgatcgaaaaaattatccgctaaaaagaattaaagagctttatcatctgcgttggggtattgagacctccttcaagaaattgaagtattctttaggcagtgtacagttccattccaaacaagataaatttattgaaatggaaatttatgcccatatgattatgtttaatgcaatcagtcaaattgatgcacaggcctatattccgcaaaagcattgcaagtatcaatatgccatcaatttcaagcaatcatgcttgattattcagagcatgtatttggcttcttctttaacgcaagattttgaacggatccttattcagatcagctattataccattccaattagaccaggccgcaaggacaagagaaatattaagcccaaatcagctgtatattatttatatcgcgtagcttaaaaaagcagaatctgtgctatgccttatttgttgtacgaaaaaagcaccaatttaaccaattaaatgttaaatcagtgctttaaaagtctaatattaattgtcaatgtcttaacttaatgacattgcctttttagtgtatatttttatttattagcccaagcatttaccaatgccttgtacttggcaacgctaattcctgcacctttactgcttcctaaatatgaatcagcatttccataaccagtattgcttacattggcaaatcccattactctataatttctgttaatcaaattcaagtagtgtcctgccattttatagccgttcgtgccctctacggccgcatcataagttgccgtccaagttggactatacttcgccggcttcaacgaatgattcttttttacatcataattccaacttttcttttcagagaaccaagtatcaaccggatctaaacccacactttgagtagcgatgttttccaaaccaatcgacttgaaataatgagtatgctttaagccaccacgtttttgatagtcagcatttaacattgaggctgctgtcaaaagtggtgacacctttaatgaccgaaccccttcacttctacgtgctctattgacactattcaaataaggcaatacagctttaatattcttagcactagttgcatcatcatttgaatgcaagtcaacgtattcattgtaccaacttgccttaggctttttacctaagcgacctgttttcaataatttcactgctgatctagcagagcttctttgccctttagtcaaagatttgtttttagatagatatgtcataaaatcaacggcatttttggctgccttaactggcttggaactcaataccgttaaagataaggtcatcatcacagctgatgcacctgcaattaaaaatcgttttttcattctttttctcccatattaatatatgtgaactacgatttaattgtagcacatacactaatggaagattttccttttaaattgcattatccatccatcttaacgtattgtcctttttcatctacaacacctttgaaatggtgcatgctgccatcttcggcctgaaattcacctaagtcaatttccccatagccctttgtagaatcagtaaccttaacatcatcaaaagtttctctgaaaaattgatgaacaattctactcttcaaccgtatatcctttgaatgctcaaaggctgcagacaacgtaaagccctcatctaattgttccttgataaaaacaattagatacaaggtcgctaaattatagcggcgcacaccactttgatcatctgaaatcggcttaatgtagcccttagtttcccaatagcgcaattgcctttgcgaaacaccggtcaatttactaacttcaccgattccaatttctaaattttgaaaaatgtcatgcataatttttttagatttcatcctgataccaccttacagtatagttatattttatatattgttgttatcttttgcaacacttgtgttaatttatctaacttatttgtaagattatttgacaatggaaaattttaagcctatagtttttatagttaacttttataagagaaaggaatattacatgaacaagcaaccaacggatattcatggaaaagcttataatcgaaacctactagttttagttttaattataggttctttctgtactgtattaaacggaacactgctttcaacagcgcttccttcaattatgcgttcatttaacatcagcaccgcaactgctgaatgactttcaacagcctttctgttagttaatggtgttatgatcccaatttctgcatggctaatcaatcgcttcggttcaagaaaaatgtatttgtcagccatgtcaatcttctttattggaacagtgatcgccgcaattgcacccaattttggcaccctgcttgctggaagaatcattcagggattaggcgtcggcgttactatgccacttttacaaacaatcatgctttccatcttcccagctaataaacgtggtgcagcaatgggaactgtcgggattgttattggcttagcaccggcaattggaccaacattatctggttggattgttgataacctttcttggcgttatcttttcagcatcattgccccaattgcgggaatagtaattatcttagctttctttttaattaaagatgttttaccaactaagaaagaaaaaattgatgtttggtcagtaacaacctctactctaggcttcggaagtctgttgtatggtttttcagaagctggtaacaaaggctggaccaatcccgagattttaggatttattggatttggaattatatttgtaatcctattcggtatccgccaattgaaaatggatgacccatttttggacattaccgtttttaaacactttgaattttcactggcagctgccttaagtggtatcaccaacttagcgatggtcggcattgaaatggttttaccattatatattcaaaatttgcgtggcgtttctgccttccattcaggtttaatgttactacctggtgcattgatgattggtattatgtcgccaattactggccgtttattcgacaaatatggtgcacgtaaaatggcaattactggtatgactttgttgaccattgggactattccattcgtctttttaactgaacaaagttcatacacgatgattatcattctttacgcaatcagaatggtcggtgtagctttggtaatgatgaatgttactacatctggtatgaattctttaccattaaacaagatttctcacggtactgctgttaacaacactttcagacaggtattaagttcaattggtactgcaattttggtatctgttttaactacaactaccaataataatatgcctggtaaaagtttacttcatgcactgccacttgaatacaagactagagcaatcagtgcaactttagacggttttcatgcttcatttgcaatgagtatcctcttctcattaatcgcattagttctttcattcttcttaaagaagggcaatcgagcacgtgaacatcaagaaaaggtggatggttaaatgatacttttaattctaatcgtagctgcaattatgtttatttactttaatatcatccctggaaaaaggcatacttctattgcatggctatcattaatcgtaacaattctttgtgttgttggcattgtagaacatgattataatcactggggaatgaaaactgaaacaacttcaagcactaatactctagtttccagtgctactcctcgcctgccaattttgctttatcagcctttaggtaatggaactgaaaaagtttacctttataaaactggtcagcttcaaaagaagccaaaatctattaaattacgcgtggtgctagttaaatcgttttagttaataaaaaagtccaatcttgttagactcgacttgtaaatagtaataatagaaaagagtctgatctgattgaactgccttaagcttaagcgttttagccaccatttacaagttagttttaaagatttagtgataatttgtcggcactggtatcgtttgtatgcaccggctgagtttactcatcggcgaaatattgatcaaattaaaactacggacagtctgattttggctttacttatctggcaagctaagacaggaattgaatcacaaagaagattctgtgaatgtttcaattgtttatcacactcacgttttaatcggcgttcacgtcagctattgcaattgatttatcagatacggcaagaaatgaataaaaaggttgacctgaatggacatttcttgatcattgacagctttccggtacctgtttgccaaccaattcgcaactatcgtgctaaaatttttcgcggttatgccaacattggttataaggccaccaagaaaatttacttctatggtttcaaagttcatgccattgttagcgatgacggttacattcttgattatgtcgtaacaaaggcatcagttcatgatgccagggagacagttgaactgatagaaaatacccatccatctaattactatcttcttggcgacgaaggctatttaggcaaagaactgcatcaacagctaaaacaaatgggttacgaactttggacaccatatcgtaaaaatatgacaggagctaaaaagcacaatgatcatcaattgatggctattcgcagaacaattgaaagcgacttttcgcttctgacctattacaatgccgagaacaatcgagcacgtagtctgataggctttcaaagccggttggaaattgcaattttagcttataatttggcttattgtctagaacgatttaactagcaccacgcgtattaaattagataaagtatcgacaaaagtaaaacgaagcagccaaccaaaagtaacgattaagactactcgctacacctatagcaatacctttaatcaaataatgtttggcgtctttggtcatgacaaggagttaaaacacagagaatatattttttctattccctccaactggaaagtaatgtcagttaacgatgccaagcagttgcaaaaacaaatgatgaaaaaacagcagtttttaaaacaaaaatcagcccaataaaataatgaagctcaaactttgatcatgatatgaaccccgaaattcggacatgaatttcggggtttttatttatggctaaattatctaaacatgacaaaattgatatttacaatagctagaaaaattaaattcattttaactcaaattttaccatatgatttaagttaacttaaatcacctttacaaacgcttatgaaatataatttaactaaatctaaatgtagaaaattatttttatcatactgcctatttcaattgcatcctatcattaaagtaatttttataagccaaatagccactaatcacggctccaaggccagtggcagaaagtaacataaatgtaatcataatctgatacttaattgcataaatgggatttacaccagcaaaaattaagccggacatcattcctggcaaatttactaatcctacagttttagccgaatctatcgtaggctgcatcgcagtcttaatgctccttcttaaaattggcatcgatgcagttttaatatcactacccaaagccaacttttctaaaacttgttgatgcagatcattaaagctatcattcaacgctttatagcataagccaactgccaccatttcatttccagcaatcatccccgtaatgggaatgacctgcatagggactggtttaattacgccagaaaaaatcagaattcctaatgtcacgtaagtccctaccgcttcggctattatcgaattccaaatattccgccccggattaggatcacgctgattagcattccaagatgcattaaaaattatcacaatagttgaaaccaaagttagccacaaggcattaacatgaaaaataaacttcaaaacgtagccgattacgactaactgaattatcgccctaatcacgctaattaaaatatccttggttagtcctaatttttctttcgcagaaattccaatggaaactaacaccagtgcaaaagctaatactaacgaccagttgctaactacaacatttttcattcgattattccgcctttttttactcttaaaatattacttgcttcatcaatttcactttgatcatgtgtaacttgaataattgtcacgcctttctcagaaacatccttaatcaaattatgtacaatatctttactttgattatcaagcccggtagttacttcatctaagagcaatatctttggtaaaaatattatgtttcgaattaacgcaactctttgcttttcaccacctgataaagcagtaatctttttatctaaaaaatcagcagagagatcaacttgattaagtaaatcagctatttgcttgtcatttacatctacttttctaatttcatacgggaaaatcaaattatctcttactgtttgcccaaataaagacggctgctgaaaacaatatgaaacttctctacgatattgaactggatttaaggagctaatgtttttttcttgatatagaatatcgcctgaattagcactaattaaatttgcaatcaatcgtaaaatcgtactttttcctgcacctgatgggccaattaaggttagaaaatcgcctttattaaccttaaatgatacatcttgcaatatttgttttttatctgcactatattggatatgttttaattctaatattttcattcttttgcctaactaaataactcatttttctaattatacaactaaaaaaataaaggaaatccaatattttcattgaatttcctttatttaaattaatatcgataatgattacttagtcaacttttgtttactttcaagtaattcagcacgttgagctaagttcatgtataacttgttgttgtaggttgcgataccttcaatttcacgaccagtgtggtattggtaagtatccttaacttcaccatcagttgcaatcttagcaattacgtcattgaatgcaaggtagaagttattgttcttggcatcataagtaaacccttgagtgtatgtgtttgctacaatgccacccttagttgcacctaccatagttggataccagttatcgcctttgcggttgaattcccagtattcagtttggtctttttctttattataaagagttgtgtaaagcttgtgatcatttacaacaacaccattattgaagtaacgaccgtctgaatcactaccgttccagcatttaatagtccaaatcttgttaatgcacatatcgctcttccgaatttggattaactcttcagacatattgctcttgtatgaaaccttattattgttatttagaacgtaaatgtatttatcagttgagcccattgcttgaccgtgaccaattggaatatatggactaactttaatgttcttaacgtaagaattgaacttcttttggctcatatcaagtaagtattgtccgttaaatgcattggttaaatggttaagattatatcctacaatatgaccattgctaatcagggtactacttaataaactagtgtacaaccagccatttgacatggtaattccttcaggaatatgacctacacggttaatatagtcatcatttttaatgtcacggtaaacacttaataaaactggttggaagaagcgagtagtgaaatctaattttccgctttcactatcataagcatgcttattcttatcaggagtaaaatcagtcttagttacatagttagcagaactgccgtagtaagtcttccaggatttcaaatcgccgttaaatggcttagcttggacgctatcagcatcagcaattccttccttagtactctttctgacagttaccttaacagttgcctttgctttaccatagctatatttaacattataggtacctggagttgagcaatcgattgcatcttctgaaatcttaatatctgctgtatcaattacagtacccatataattggttacataacttactgcatcagttggatcaaaatcgtagtgactattttgtactaaactgatagtctttggtacagcgatagcatctcttgtaaagtagttttggttaacataaccaactttacgaccatttacataaatacgccaataagttgcatcctttgtcttaattctctggtcagattgaatatgagcatattgataatcgctagcatcagcaatcttaccactaggtttaccattactaatctttttataaacaggataattcttattgctacctactttaaccattaagtcataagaagtacttgtttgagctggtcccttcttcgcactggaatcagtcttagcagtatctgtattactatcagtagttttagaattatctgcaaatactgcatttgtagaaccaattaacaaaccaacacccagtgctacagctgaagtagcagttaaaattttatttgaatacttcaaacctatcctccgtatcttatattttgcattttacttttatattataatatataaacactgttagctaaaatacatttttattaccattgttaccattgagcttctttatttgacactttcattacgaagtgatttaattagcactgtacttgaaagagtgctaattaatacgaaatcaattaggaggcaaatttatgctagtacctacagttattgaacaaactgctcgtggtgaacgtgcttatgacatttactcacgcttattaaaagacagaattatcatgcttagcggtgaaattaatgaccaaatggctaactcaatcatcgctcaattactcttccttgatgctcaagacaataccaaggatatttcactttatatcaactcaccaggtggtgtaatcacctccggcttagctatcatggataccatgaactttattaagtcagacgtatcaactattgcaattggtatggcagcttcaatggcttctatccttttgactagtggtaccaagggtaagcgtttcgcacttcctaactcaactgttttaattcaccaaccattaggtggtgctcaaggtcaacaaactgatatccaaattgcagctaacgaaattttgaagagccgtaagaagatcaacgaaattttgcacgaaactaccggtcaacctttggaaaagatccaaaaggatactgaacgtgacaactacttaactgctgaagaagccaaggaatatggtttgattgacgaaatcatggttaataagaagaagtaattaattattaaaaattattcacactctaaaaggagcttgcactcattgtgcaggctcctttttcttattctcttaaactctcagctaactcatgtagtttcttaaatcggtgattaactcctgacttcgaaatcggaccatccggaatttgattagctacttcctttaaagttaattctggatgcgccaatctaaaacgcgctaaaacttgcaatttctctggtagatcatctaagccgttttcttgttcaatcagctggatgtcttctacctgcttagctgaagctgaggctgtttttttcatattcgcggtatcacaattaaccaagcgattaaccgaatttcgcatatctcgcataatacgcaaatcttcaaagttaagcattgcattaagtgcacccactatatgcaaaaagtcgccaatttttgcggcttcttttaaataaacaatatagcctcttctacgtttagttgctttagcatttaaataaaaataattattcatcaacttacataaatcctcattatggtcctcataagttgaataaatctccaagtgataacgactcgtttctggattattgacactacctccggctagaaatgcaccgcgtaaataggacattgctccttcacgtgaagtcataattctctgcggaattcgcgttaccaaacctttttcaggatcccagatttgtaagttttctaggatttcttgtaccttctgattcaatcgtaccaaatattgattattttttttcaatttcatcttgcgcgagacaatcagcaatggctcaataccataagcaatcttaatcagcttaaaaattcgtcgagcaatcgcaggattttctgtagttatatctaggctaaattgatgatcgtgcaagtttaatacaccattcattcgcaaaaaagcagctaactctgctttggcatgctctggatgcacctcaagcgaagttagctcctttttgacttcactagcataactagccatcattttccttcattcttttacgtgacattgattcaaatgccagattaataatttcttttcctaccttttcaccatcatgaaataccaatccatgacgttgatcgataaagtcatcagtaatgacacggcagttttgctttcttaagccttcaaagtcattcttaacaggctcaagataagcatcataatcttctgggtgaaatttgctcatatcaattttggcaccattaaccagagcggtattgatataatttccacctaagtgatcgttaattacctgtacgtgttccgcatcactaaagtgatctgtctcaccacgctgagtcatgatattgcaaatataaataacctcggcgtcagtctcacgcactgcttcacctaaattagagatcattaagttaggtaaaattgaagtaaataaactacctggcccaagtacgactgcatcagcttgcataatcgaagccagtactggtaaaacagctctaggctcttcatccgaatcagtatcggtcacccagacacgcttaatccgcttatctttagatgtgatttcagtttcaccagactccgtagttccatccacgaattctgcgtttaaagtcaatggttcattggatgctggaaaaacatgaccatcaattttcatcatttttgacaaagattgaactgcatcaaagatattgccatgcatttcattcaatgccgcaataattaaattaccgattgcatgtcctgaaaaaaaggaatcggatgaatcaaatcgatactgaaaaatattcttttcttcctgaggtaagtcactaagtgataccaaaacattacggatatcaccaggtggaactacgttaataaagttacggattgaaccagatgaaccgccgtcatctgaaaccgttacgattgcagtaatttccgcgttttgatcttttaaggcattcaaaataactggtaaacccgtaccgccaccaattacgactacacggggacgtctgcctttaatcacgcgaacaatccttgtttctccatatggcacaggtgcgcacctactttctaatataacgactcacttcacggtgagtaatatcgactggatattttttagctaaatctcgtgccaactgttgggcaattgaaacactccggtgttgacccccagtacaaccaattgcaatggtcaacttttccttcccctctttgatatatccagggatagctgtttcaagcaaatcaagcaattttttataaaagacctgtgtttcttctttgttcatcacatagtcaaatacacgcttgtccagtcccgtaaatggtcttaattctgaaatataaaatgggttaggcaaaaaacgcacatccattacaatatctgcatcaattggcatcccatacttaaagccaaatgacatcacttcaattgaaaatggctgccgcttgcgatcactaaatgtattgattaatttttgctttaattccttagtcgacaagtttgacgtatcgataatataatttgatctatttttaattggcattaaaatacgacgttcttcttgaatgccatcaagcaagcgacctttgccattattggctaaaggcggaagacgccttgtttctttataacgagcaaccaagacatcatcggaagcatccaaaaataggatagtagcttgcacattgccattatcttcaagtgaattaacttcatccaataaatcgcgataaaatgtcttaactcgtaaatcaattactacggctaccttatgaaagtcattggaattattaattaaatcccaaaaactacctaataaagttggaggaagattatcgactacaaagtagcccatatcttctaagtcatgagcgaccacagttttacctgctccgctcatgcctgtgactattaataattgttttttctcatcagccatactgaaatcctcctctttacaaattatatcataccgggtgtgtcataattgtgcaaaaaaaagaagcctttcggcttaaatttttatcaaatattaacggtgcataaatgcaaccacaatttcattaatgccaaagactaataaccagaatgcaactaaccatactaagcttaaggctgcgattactggattaataattaagaagaaggcaataatcaaacttaaaatattcaaaatcaagttaaatacaaagtatccggttgaaaatgcacgtaagtgccatgaccaagcaatacctacaactgaatcaacaaagaaccagattgcaaataagtaagcgatagtcaaaccaccaatatcatatgagcaaatgaacaagataccgataatgatatctaatacacctgacacaattgctacccaactacgtgagaaaaattcacgaaagcgtgagtaagcagccaaccatacaataccttgaacgattgatacaatagcaaaaatcaagacaaatgcatgcaaccctttagctgggtgacgtaataacacgaacgcaactacgaccattaagataccggcaataaatgcgccccagtcaaagccgtgattatctctagaactagaaaaaatatccatttttattcctccttgcagactattttacacttattcaaggttaataaaaactattggctattgtcttctagcctatttttttgcttcttttgttagtttagtatcacgttctaagactggtttcaaatactgaccagtatagctttctttaactttcgctacttcttctggcgtaccggtagccacaatttgaccgccacgttcccctccttcaggacctaagtcgatcagccaatctgcatttttaattacatcaagattatgctcaataattaaaaccgtattgccttcatctaccaaccgctgcaaaacttctaataaacgcttgatatcatcggtatgcaaaccggtagttggttcatcaagaatatagaaatttttaccagtagaaagcttttgcaattcagcagctaatttcattctttgagcttcaccaccagataaagttgtagcggattgacctaatttcacatagcccaaacctacatcaacgatagtctggagtttacgctgaatcttaggaatattttcgaaaaacttagttgcttcattaatcgtcatatcaagcacttgagcaatattctttccccgataagttacttccaatgtttcagaattataacgagtgccgtgacaaacctcacatggtacatatacatcaggcaaaaagttcatttcaatcttgataattccatcaccatgacaggcttcacaacgtccacctttgacgttgaacgaaaatcttgctttagtataaccacgcaattttgcttcattagtttgagcaaataaggttctgatatcatcaaaaacactagtataagttgcaggattactacgtgatgttctaccaatagggctttgatcgatatcgatgattttttcaatattcttgtaacccttgattgacttatacttacctggcttagttgaattattgtttaatttttgggctaaagcgcgtttcaagatcatattaaccaaagtagatttaccagaacctgagacaccactgaccacaataaatttgcccaacggaaaatcaacattaatattctttaaattattttcttgagctccagtaattgtaatctttttaccattgcctttacgacgcttcaatggaaccggcacaaattttttaccagacaaatattgccccgttaaagaatcaggattctgctctacttctttaggagttccttgtgccataactttaccaccgtaaacaccggcaccaggtcccatatcaaccaaatagtcagcttgccgcattgtttcgtcatcgtgctctaccacaattaaagaattgcctaaatcacgcattctctttaaagaagcaatcagccgatcattatcacgttgatgcaaaccgatagatggttcatccaaaacatacataactcccgataagtttgagccaatttgagttgccaaccgaatacgctgagcttcaccaccagacaaggtattagctgatcgagaaagagttaaataatctaatcctacactatccaagaatgaaagacgatcgcgtacttcctttaaaatcggcttagcaatcatagtctcttgctcgcttaatttgacgtccttaaagaaatcaagtgctttatcaatagaaagctccgaagcttccgcgatatccttgcccatgactttcactgctaatgctttttcattcaaacgcttgccgtgacaagttgaacaagtaagttcagtcatatatttgcccatcacatcacgcataaacttggacattggtcgtttataacgccgctcaacattggccattactccttcaaatggttgaacggtatcattaacgccaaagtcaccagttacatggaatttcaccggcttagttgagccatgcagaataatgtcgcgttgacgtttagttagtttattaaaaggcttatccatcggaatttttaatgccgtgcaagcttgttccaacatttcagtatagtaattggaagtcttccatggagccagtgcaccttcagctaaagattttgttttgtccggaacaaccaaatcttcgtctactgctaacttcatccctaacccatcacaatcaaggcaggcaccaaatggtgcattaaaggagaacagtcttggttccatttcacccacagtaaagccacactttggacaagcataatactcagaaaagttaagcatttcaccaccaattacatcaacattcatgtagccatctgacaaacgaagtgcagcttcaatagaatcaaataagcgagacttaatgctatccttaacaatcaaacggtcaacgacaatatcgattgagtgacgcttgttcttagctaattcaaaatcctcaccaatttcgtgcatctcaccatcaacaattacacgaacatatcctgcacgttgcactcgcttaaatacttccttgtgttctccacgcttagcacgaataactggcgctaaaatttgaattttcgttctttctggtaaagccatcactcggtcaaccatctgatcaactgattgtcgttgaatcagcgtcccatcattaggacaaattggatggcctactctggcccaaagcaaacgtaaataatcattaatctcagtgacggtcccaactgttgaccgtggattatgtgacgttgttttttgatcaattgaaattgctggatttaaaccatcaattgaatccacatctggtttatccatttgccccaaaaactgtctagcataactagaaagtgattgcacataacgtctacgcccttctgcataaagcgtatcaaaggctaaagaacttttacctgaaccagataagccagtaataactactaacttatccttaggaatagttaaattaatgtcttttaaattatgttcacgtgctccgcgaataacgatcttatcatttgccattaaaattctttccttttcttgatgatttttgcaattccataattgcatcccgcaagttagcagcttcttcaaagtcaagcttcttagctgcttcttgcatttgctcttgcaagttgctaatcattgtcttcttttgcttagccgtcaattcatcaaaattaagatctgcaaaactatcagatttttcttctttttcactcgacggtttagtaatcgaaattacgtcttgaatcggcttaatgattgtcttaggcgttatgccatgctctttgttaaattccatctgaattttacgccgacgcttggtagctttaatcgctgctctcatggaatcagtaatcgtatcagcatacatgattacttcaccattggcattacgggcggtccgtcccatagtctgaaccagcggccgatatgctctcaagaagccttccttatctgcatccagaattgctaccagtgaaacttccggtacatcgattccttcccgcaacaggttaattccaattaagacatcgaacttacctaaccgtaagtcacgcaaaatttgcattctttccagcgtcttaatatcagagtgcaaataacgtactttaattcctaagtccttcaaataatcggttaagtcttccgccatttttttggtcaaagtagtaacaaagactcgttcatgacggtcaatccgtttattaatttcgccaactaaatcatcaatttgaccctcaattggccttacttcaatcttgggatcaagcaatccggttggtcgaataatttgttcaaccttatgatctgttcgttcaagttcataatcacctggggtagctgagacatacaaaatttgattaacatgcttttcaaattcggatagctttaatggacggttatcaagtgcagatggcaaacggaaaccatagtcaatcaaggtttgcttacgattacggtcaccattgtacattgctctaatttcaggcatagtagcatgtgattcgtcaattaaaattaagaaatcatctgggaagaagtccaacaaagtatacggtggctctcctgcttttcgtccttccatatgccttgaatagttttcgattccgttggtatagccaacttcacccatcatttccatatcataggtagtacgttgcttgattctttcagcttcaagcaatttgccttcgccttcgaactttttaacctgcaatttcatctctttagaaattgctcccaaagctcgccgcaattgctcgtcattggtcataaagtgcgtagctgggaaaagcgaaatactctcacgctcaccgatcacctcaccggttaacgaatcaacttcaacaatgcgatcaatttcatcaccaaagaattcaattcgataagcatgattagaattgccggctggaaagacctcaactacatccccgcggacccgaaaacgaccgcgttgaaagtcaatatcattacgatcatattgaatatttaccaaatcacgcaacaaggtattacggtcatattcttcgccttcatggatcatcaagacactgcgcgcatactctttaggatcacccaaaccatagatacaagaaaccgaagcaacaactactacgtcattacgctccattaaagctgaggtagtagcatgccgcaactgatcaatttcatcattgattgccgaatccttttcaatataagtgtctgattgtggaacgtaagcttctggctgataataatcatagtatgaaacaaaatattcaactgcattattaggaaagaaacttttaaactcaccatatagctgccctaccaaggtcttattatgcgtaataactaatgtaggcttattcagcttagcaataatattggccatggtgaaagttttcccagtaccagttgcaccttccagaatctgttctttatatccttttttaaatccagcagtcagtttatcaatagcttgctcttgatcaccggctggtttaaactttgatactaattcaaatttgcgatttttttgtcgtttaatcataaaaaactcctcaagaaaaaagttggacaagcatagtccaactttttaattagtatctatattttactaccgcgaacgtgctttcgcacgaaaaatgcttaattatttaagtaaatctgctaaagccttttgataatcttcagctgccttttctgcagtggcaatgtcttttttgtttacaccaacataggccttaattactggttcagtacctgatgggcgaagtgctacccaggtttcatcatctaagaagtacttcaacacattagattctgggaacccttctaatggtgtctttttgccattttcaatagtttctttttgcaagaaatcttgaatcttaagcactttactaccgccgatttcagttaagtgctcattacgcaacttgctcattaattcggccatcttcttttgaccaccaatacctggcatttcaattgcacgggtaatttcataagcaacgccatacttttgccaaatttcttgcaaaccatcaaagacagtcatcccacgtgaagcatagtatgaagcaacttcggcaaacatcaatgcaccctgcatggcatccttatcacgagcaaatggtttaaacaaatagccatagctttcttcaaagcccatcaagaacttagcatcaccagctttattcatccggtcaacttcttcaccaatgtacttaaagcccgtcaaaacatgcttagtcttaataccaaagtcctctgcaatcttaaatggcaaagcactagaaacaactgaagtaacgatctcataatcagggggtaattgaccattttccttcatatgagccaataggtagtaagccatcaaagtagcaatttggttaccagtcaaaacttggaaatcaccatcagtttttctaactgctgcacccattctatcagcatccgggtcagtagcaataatgacattagcatttacctcatttgccaacttaaaaccaggttcaaaaacatcacggtattctggattaggcttaattgtggttggaaattctggatcaatgattgattgacttggcacaggaatcacattatcaaagccgccttgtctgaaagcacgatcataaagcatcttgcctgtaccatgaagtggagtataaatgatctttaacttgtcagcgttggccttaaccatctctggatcaacagttacttgcttcaattcattcaagtaatcttcatcaacatcttcacctattaactgcaaggtgccattagcacgcaattcttttactggtgcagccttgacagcaaaaatatcagttactttttgagcataagcaaaaagtcgatctgcattatctggtgccatttgtgcaccatcttcaccgtaaactttatagccattgtattgcttagcattgtgtgaagcagtgatattaattccagcgaaagtatgcaaatgacgtactgcatatgaaagttctggtgtcggtcttaaatcatcaaataagtaaacatgaattccgtgtgcacctaaaactctggcagcatgttctgcaaactctcttgagtgatatcttgaatcaaaggaaatagctaccccacgctttttagcatcagcaccattttcttcaattaaacgagctaagccttcagttactcgacctacagtaaacaagttaatccggttggtaccgggttcaagacgaccacgcatccccgcagtaccaaaattaatatcctgtccaaaggcatcttcgatccatttttcatccttgcccaaagtatttaattgatcttttaaataatctggtaaattagtagctttttgccattctgtataaatttctttagcgtccatcaatgtcctctattcattaaaagttggatttctaaagcgctttcaaactgttaacaattttctattatctgctattaattataaaacttattagtcattaatttaagctttagacaaaaaaagacatgtccaatacgaacatgtcttaatgaaaaaacgaataaatttaatttttcttgtcttgtaagtcttggtagtaattatatgcagcttgaccagctacactaccttcaccaactgcattagcaatttggcgtaaatctttttgacgaacatcacctaaagcaaagataccaggcaccttagtttccatatgatcatcagttacaatccaaccatggtcatccaagataccaagatccttaaaaggttcagtttgtggtaaaacacccacgtaaataaagacaccagcaactggaatttctttttcggcaccagtttccttatcgcggtacttaacccctgtgactttcatgtcatcgcctaagatttcttcagtttgtgcattccaaatgaaatgcatcttcttgtttgcaaatgcacgcttttgcaaagttggttgtgctcgcaattgatcacggcggtgaataactgtaacgctcttagctaattgtgaaagataaattccttcttcaattgctgaatcaccaccaccgatgacagctacatcttcatctttaaagaaagcggcatcgcagacggcacaatatgaaacacctttgcctgaatattcttcttctccaggcacattcaaatgcttatgatctgaacctgtagcaataattacgatcggtgcacgatactcattgccatcatcagttttaactaacttatcctcgccatcgagttcaacactttgtacgttgccatacttataatctggttcaaacttcatcattgtgtcgtacatcttttgactaagttctggacctttgatttcagaaaaaccaggataattgtcgatagcatcagtattgttcatttgaccgccatagggaccgcgatcaagaacaagaatctttaagttagcacgcgcagcatataagccagcagtcatcccaccaggacctgcaccaataataattacgtcgtatttatcagccataatctatccttctttctacttacttttgataagcaaataatacaatagatttaacttcttgccaactattttgcttatcttttataaacgaatttcaggctttggttctctacccatcattttcttaatttctgtatcaacatcagcatcttcataaagaacacggtagattgcctctgaaattggcatatcaatgcccttttcttcacataattcgtgaacagctttaacagtagtagcgccttcgacaacttgtcccatatttttcaaaacgtaatctaaagtcttgccttcgccgatttgtttaccagcacgccaattacgtgagtttactgaagtacaagttacaattaagtcaccaatacctgacaagcctgagaaggtcattggcttagcaccaaagtattgcacacccaaacgagtgatttctgctaaacctctagtcatcaaggcagctttggcgtcatcaccatatccttggcctactaaaatacctgcagcaatcgcaattacgttcttaacggcaccaccaacttctacacctactaaatcatcgttagtgtagaaacgaacgtagtcattggagaacaattcttgtacccgcttagcattttcttcattagttgatgcacatgcaatcgcggttaaatctttttgagcaacattttctgcgtgactaggacctgaaattgcaacaatcttatcttcatcatctggataaatttcttcagttaaaatttcagaaataagcttcttactgcctggttcaatccctttagttgcagtaactaacagtggcttagcacccgtcttatctaaaaccttgcgtacgtttttagcaacgattctaactgccttagttggcaaaacaaataaaacaagttctgccccatcaagagctgcttccaaatcaccagtagccttggtattctcatttaatttccaatccttcatatagtggctattggtgtggtgagcgttaatttcttcattaacactatcaatgttaccgtaaagagttacatcgttaccattatcggctaacattgaacccaatactgaaccccatgaaccattacctaaaactgcaatctttgtcattttttctctcaaactttctaattaaaatcttttattaattctaatctcttgaatacgggtattttaatccactaccatccaaataccattttggattaacgactttccgccgataaatccataaaataattgtagcaataaagaggattaaacttaatgcctgtgatactcgtattataccaaaaatatacagactatctgtcctcattccttcaacgaagaaccttactacactataccaaagaagataggtcatgaaaacttctccctgcttgaagagatgttttttatgacgcaaggatagaattaagattaagccaatcaaattaaaaaatgattcgtacaaaaaagttggttgataatacgtcccgcctattttcatttgctcaataataaattgtggtaagtgtaagctttgtaaaaaatgaagagtagttggtgcgccgtgcgcctcttgattaacaaaattaccccagcgtccccaaatctgagctgccatgactccaggagcaatgatatccagcattaaaaatggaggtagcattcgtttataacagaaaatcaacagcacaattaagccggcaattaaaccaccataaatcgcaatcccaccattccaaatcgcaataatttgctcgggatgctgtgaataataaccccattcaaaaatcacataataaatacgtgcgccaacataccctaacggtactgcccacaatagcaaatcgacaaaatcatctggaataatttgacgtttttttccttcgttaatcgccatccagcaagctaacataatggctactgccataatgatgccataccatttgacacttaaattccctaaatgaaaggccaccggattaattactaaattagtcattatgcggcaccttattcgtatcttcttttgagtgctctgaaatcagactagtcaaattattatcaaaagtttgagttgcatcatagcccatcttcttagctctgaagttcatcgctgcaacttcaataataatttcaatattgcgtccaaccttaactggaatattaacctgtggaattggtacattgcagatttcacgcgtattttcttgaaaacctaggcgatcataattagcttttggatcccaattaaccaaattaattaccagttggatttctgttctattttttacggcaccggcaccaaataaattcatcacatcaataatgccaattcctctgatctccattaagtgctttaagatctttggtgcttcacccacaacggtattatggtctttttgaaaagcatctactcgatcatccgcaattaatctgtgtcctctttgaactaatcccaaagcagtttcagacttaccaacaccagatgcaccagttaacagcacacccatccctttgatttcaaccaaaacaccatgaatgctggttcttttggctaaacgagcacgcaagtattcagttaaaatactggatatgtaggtagttgactctcttgtacgcaaaattgggattttgtgttcctctgctgccgtagttaattcttccggtacaggcaaagagcgagaaatcaaaaaacacggtgtagccttagtacacattttgttaaagacatgcattctaatatcatggtccaagcgtgccgcatatgaaatttctgtccgacccaataattgaattcgttgcgcaggataaaaatcaaaataaccagttaattctaatccagggcgataaatatcagaaacataaatttcttcatctttgatatattcctgtccttggtaaacttcaaggatactctgattgtcctggatcaatttgcttaatctaacttcatcagccatattaggcctcctaactatttatcaatatctttagtggtgacatttctagctttttttcttggtctaggaccagaagtactagtagccttaaaccactcacgataacttccactacttggcatattatcttgatttttccttccagtaaaccgataaataagccaaatgattaaaatcgcaattacagctactggtaaaagtaaaataaatgccttaaatagaacaaacaataaacttaaaataattagcgctactaaaacaagcgttacaatttccattaaactcattttttaacctaatctggattctcttgactaagcaaccactgtaaataggaataaataaacggttgcaattttccgtccattactccttgagcgtcagctgtttcatgacctgtccgcaaatctttcactaggttgtaaggatggaaaacatatgacctaatttgtgatccccagccaatctccttttgatcgcctttcagagcctgcttttgcttacgctttttttcttcttctaagtgaaaaagctttgctcttaattcattcatcgcagtttcacggttttgcaattgtgaacgctgtgcctgagacgtagtcacaattcctgttggtaagtgcgtaattctaacggcactagaagttttattaatatgctgcccaccagcaccactagagcggtaaacatcaacccgtaaatccttaggatcaatatcaatttgaatactgtcatcaacttctggaatcacttctacagaagcaaatgatgtatgccgtcttttagccgcatcaaatggcgaaattctaaccaaacgatggacaccattttctgatttaagcattccgtaagcatttttacctacaattcgcgcactaacgctcttcaacccagcttcttcaccaggctcataatcgttgatttcaaatttaaaaccagctgtatcacaataacgttgatacattcttagaagcatctgtccccagtccatcgcttctgtaccgccagcaccagggtgaatttccatcaaagcattatggctatcatacttacccgacaagagcaggtctaactcataattatgaaaatcttcttgcagcgtagctagatccgcttcaacttctttttgcaagtcaggatctggttcttcacgcaaaagttcaaccgcagtagtttcgtcttcgtagctagtttgcaattttaaaaatgaatcacgtttttcctttaatcggttggtttcactaattaatttttgcgctttttcctggttattccaaaaatcaggctgcgccatcttgttttcattaatttcgatgctttcatcaatcgcatctaagtcaaagagaccccctaaagtgatttagacgtttttttagttcatctaacacactttgaatttcactaatttccatttttacctaccatcttttattttattgcaaaaaaagggaagctcttaactcccctttttctttattaacgactaagattttgtctaatttcagccttcatgaacaaacgagttacatcaaattcaatatttgaaatcatttcttcaaacattctgtaaccagaatcttgatattcaactaatgggttcaattgaccgtatccacgaagaccaattgattgacgcaactgatccattgcatcaatatgatcagtccaacgatcatcaaccacacgcaagataactaccttttcaaattcaagcatttggctaggatcgcctaaggccttttccttatcttcgaagttttgctcaacaatgtcataaagcttcttcttcaaatcttcaacactaatagtcttgaagtcaattgagtcagttaccttgtctgaagtcaaacttgaggaaatgaaatcgcgtaatgagtcaagacgccattccttgcgttcaccttgagtaaacattgctacttggtgatcaattgttctgtgaatcattggaattaaaacattcttcaatgacttatcagcttcaatgacctgcattctttcgccgtagataatttcacgttgaatacgcataacatcatcgtattgcaaagtttgcttacgagtatcatagttattaccttcaacacgtttttgagcagattcaacttggcgagtaatcaagcgactttcgataaccttatcatcatcattatctgataaacgatccaagaagtccttaactcgatcaccaccaaaacgcttcatcaaatcatcttcaagcgacaagtagaatctggtgtaacctgggtcaccctgacgaccagaacgaccacgaagctggttatcaatacgacgtgattcgtgacgttcagtaccaataactgccagtccaccaagttctttaacaccaggcccaagcttaatatcagtaccacgaccggccatgttagtagcgatagttacggcaccacgttgaccagcgttcatgatgatttgagcttccttagcgtggttcttagcgttcaaaactgcgtgaggaatacctgctttatcaagcatcttactcaaacgttctgaactttcaatggcaacagtaccaaccaaaacaggttgaccattagcgtgacgcttcttaatttcttcaactacagcgtggaacttagagtccaaagttggatacaaaatgtctggcatgtcttttctggcaattggacggttagtaggaatcgtgattacctgcatgttgtaaatttcacggaattcttcctcttcagtcttagcagtaccagtcatacctgacaacttcttgtacattctgaagaagttctggtaggtaatagtagcttgcgttcttgattcttcttgaatcttaacgccttccttagcttcaatagcttggtgcaagccatctgagtaacgacggccttccattacacgaccagtgaatgagtcaacgatcaaaacttcgccatcttgaacaacgtagtcgatatccttaagcatgatgtagttggcacgaagagcttggtcaatgtggtgaaccaacttttggttttcaacatcgtacaagttctttaggccaaagtgttgacaagccttttcaataccagttctggtaagtgaaatagtcttagttggccagtcaatcttgtaatcgccgtgatcttcatcatcgtcggcatcatcatcgctcttgtcttcagtcaaagtcttaacaaagcggtcagcacggatgtaatcactgtttgcttgttcagcttcaccagaaataatcaaaggagttctagcttcatcgattaagatagagtcaacttcgtcgatgatagcgtagttcaatggacgttgtaccatttgttccttgtaaacaaccatgttgtcacgcaaatagtcaaagccaagttctgagttagttgagtaagtaacatcacagttgtaagctgcacgcttttcgtctggtgacattgagttcaagttcaaaccaacagttaagccaagccacttgtaaagttgacccatttcttcttcgtcacgacttgaaaggtattcgttaacagtaacaacgtgtacacccttgccttcaagtgcgttcaagtatactggcatggttgctgtcaaagtcttaccttcaccagtcatcatttcggcgatgttaccgtagtgaagtgcaataccacccaaaatttgtacgtggaatgggtaaagtcctaatacacgcttagcaccttcacgagcaactgcgaatgcttctggtaaaagatcatccaaactttcgcccttctttaaacggtcacgaaattctggtgtctttgcttgcaattgttcatcagatagcttgctcatttcatctgcatgagcttctaccttagctgcgattttttcaaatttcttaagttctcttttatcgtcgttatatagtttctttaaaatatttaccattaaatcggtccttatatgtcgtaaagtctaaaaatacagaataattttaacatgtttatcagcaaaataaaaatattctaaacaaaaaaccccacgctcaaacaaacgcgaggttttgaattaacgagtattttaactcaattattcgttagtttcaattaagccgtaacgaccatcgtttctacggtaaacaacgctagtgccgttagtttctgcatcttcaaaaacgaagaagtcatgttccaacatgtccatttgtaaaatagcttcttctggatccattggctttaagcttacacgcttgttacgaacaatatcaaattcgctaggcttcttttcttcttcttcaggttgttctacaaagaaatcttgtaatcccttttcacgactctttctatttacacgagtcttgtactttctaatttgacgttcgagtttttcagaaacgaagtcaatgctacgatacatatcatccgtggtttcttcggctctcaaaactaagtatggtaaaggaatagtaacttcaactttagctgagtgatcacggtatactctcaagtttacgtgtgcaatcacatcttgattcaattcgaagtacttctctaacttgtttaaccgcttttctacataacttctcaaagcatcagttacttcaatattttctccacgaacattgtactttaacatataagattctcctttcaccgctatgcggtttttctttacaaatttattataccaaaaaatgtaagcgtttcataacaaatctaatgacaaattgaaaagctttcaattttcatttcgggaaaaccctgctgtaaacggtcccgcgcgtgatatagcgtgcgcccggtcgtgtaaatatcatccaaaattaatacttttcctgaaactatattttccttgattttaatatttttatcaatcaaaaagctttgaggcgttttaagccgctcctctttgtttttctcaccttgggcatgactacccgattgtttaatcagaagcggtgtcagcggcaaaatatcagcataaatagcaaaaattgtatcaaactgtcgtcttgattgatgttcaggtgaagtgggcacgggcacataaaagtcatagttagttttacacaaatagtcataacacaaatcttgcaatacttcccgcaaaacataatctccacgccgcttatacgcaaccatcaagtcatgaaaagcagaattataacgatataaagcatgattatgcagaatattttcgccataaatggcttgccaatttcgacaatcgctacacataaagccttgacctagttccttatcacagccagagcagcgattgtctgctaacttttcaaattgttttaaacattgcaagcaaattttactttttcgcgctgttttaaaagaaaaaagttgtgcaaattgtaccggtggagtaaactcctgctcacataataaacaagttctcatctattcatccccttgatctgcttaatactctgtcgaatattcttggtataacgatgataacaatacaaaactaagcccgtttggtcatcgtgagcccgaccaactcgacctgcaatttgcaccaaactagcagcggtataaattgcatcatctgctgcaataataattacccaaacatttttaaaagttacaccacgctctaaaattgtggttgtcaacaataagtcatatttacgatcacgaaaagcctgtactttttctaatcgttgcggatcttgtgcatgaacaccggccaatttaattttattttgcaactttttccgcaaagcttcttgataaagcggaatttcttcaatccgtggtacaaacaaaagcaaaggatgaccactttgaatgacttttttaatctcctgcattaatttaggatgaatttgtcccttccgcaaaaacggcctgataaaaagcctttctcttggtacaggcaataatccaccatgaaaacgccgatttaagcgcaaaatttctaacttccctgttttagcttccaaaagcaaatcgttcgttggcgttgcggttaaatacattcgagtcccagttgttttaaccgcatttttggccgcaaaatgtagttgcggattacctacataaggaaaagagtctacctcatcaattaccaataaatcaaaggcacgataaaacttcattaattggtgtgtagtacaaattgtcaactgctctagccctatttccttaaattcacggccatgatacttaccgatctcaacttgggcaaacgctgccgaaaatcttggaaacagctcatttaccacatcaattcttggtgtagcaatacaagcgcgctgtccttttttcatacatcgagcaatcaactgaaacaacatctcagttttacccgccccagttacagcatgaaccaatgtattttttctttgttcaaaattttgtactaatttatccgaaatattctgctgcaatggggttagtttaccttgccagcttaatcccccgtttttaacatgagaaaaagtattattactgtcttttctaataagccaatcgccctcatttgcacgtcccaagccaatacaaccacgacaataatatttaccattaggcagtcgactattaacttggctgccacagcgattgcatttacctttttcaattactggaattttgcggcatccctcaaatgtgctagaatcctcttgactaacaatccattgacgacctgataatagagtcaaatcttccatatttttacctccctattatctattacgcaaaaagaggcgattattttgtcagaaaaggaaaattttttaactattaaagaaaacggcaccggtgaattaattatcaaaaagagcagattcattgccaatattgcccgcaccactactactgatgcggcaaatgattttattcaaaaaatctctaaaaaatatcgcgatgcttcgcacaatacctttgcctacacgatcggcttaaatgacgaccaggtcaaagaaagcgataatggtgagccatcaggtacggctggtgttcctgaattaaaagcattgcaattaatgaatttaaaaaacgttacagtcgtagtaacccgttattttggtggaatcaaattaggagcaggcggtttaattcgtgcctattccaatagtgtcaccaatgttgttgaaaaagtcggcgtcattaaacgcgttttacaacaagaattaatttttagcgtaccctataaccgcttcgatgaagttgatcattacctaaaacagcaaaaaatttttattgccaataccgaatacggtgtggatgttaaaattcatatttttgttaacgatgaccaacaagctaaacctaaggaagacctaactaatttattggccggacaggttacctttactaatggtgaaaaacgctataatgaaattcctgttgaagctaataattatcatgaacaataaaaagagcatttggatatttccaaatgcttttttgctacttattattttttttactcttcaattgatctggtttttcgtctcctaagtgccaaacttcaattgttggatcagttttactcttttgattaataattttctgaattacatgcatcaaaggatggtatttttcacccaataaaccaattgattccacaaaatactctaaggcaatcagcaagcctaagatcagaagccaagtgccccaagttggcgaaagcaggaataataaagaaataaatgagaaaaccaatgataatgcgtaaatagtcaataccgtctgtcggtgcgttaaccccattcgcatcagctggtgatgtaaatgatgcttgtctgcttctgaaattggctttttgtttagctttctccgaatcattgcataaacggtgtcagtaataggcactcccaaaatgataattgggaccaacaatgaaataaaagttacattctttaaccccttcagagataaaacggcgatcataaaaccaatataaagtgcacccgtatcacccaagaaaatttttgctggatggaaattatatggtaaaaagcccaataaacaggcagctaacataaaacaagcaattgggacatatagctgatgagtgtgcaagaagaaataacctacgatccccatggtagtcagagagatcattgaaaccccatcagctagcccatcaagtccatcaatcaagttaactgcattagttaaagctaagatccaaaaaatagtaattgggaaactccaccaacctagatttacttcatgtgcgatgaatggcacctttaacacattcattctgattccagctaaaaagtagataatcaatgaagcgataaaaatcccaaacattttttgtctaggttttaactccaaaatatcgtcgatcaatcccgtcaaaacaattacgcttgaagcgagtaaaatcgaaaaaatttcatgagtcggaaattgctcacgcaacagaacaaaagtaccgatattaaaagtaacaaaaatccccagtccaccaatcgttggcattggtttcttattaactcgccgggcattaggattatcaacagctcctaagacaaaggcaagccgtcgaataaacggtgtaattgccgctgaaataattactaataagaataattcaacaataattttaaacatatttggctactttccttatttacttgttctaattatacaagtagtcagtattttgcacaaatagcaaaaaagtttggaaaaattatcttccaaactttttaatttatttagcgatcgccacaactcttttttcacggataacggtaatcttaatattacctggataatcaagttctttttcaacctgattacgaatatcacgtgccaaaataactgtccgatcatctgaaatttcgtcaggttcaaccatcacacgaacttcacgtcccgcttgaattgcataagcctgcttaacgccttggtagctcttagcaatcttttccaattcggtcaaacgtctaatataattttccaaactctcgcttcttgcaccaggacgagcactagaaatcgtatctgctgcaacaacaagttcagcaataaacgacaacttaggcacatcgccgtggtgtgcagcaatcgcatttactacaacatctggttcatgatatttacgagttagttcaaccccaatttctacatgggaaccttcaatatcatgatcgatggctttaccaatatcgtgtaataaccccgcgcgaactgctaatttttcatccaagcctaattctgcagccatcgtgcctgctagcttaccaacttcaattgaatgtgacaaaacattttgtccataagaagtacgatatttaagacgacctagcgtcttaactaattcaggattcatccggtgaattcccagctccatcaaagcactttcacctgcttcatagatgtcatcgttaacttcttttctggccttatcgaccatttcttcaattctagctgggtgaatgcggccatccttgattaagcgttccatcgctcttttggcaatttcacgtctaattggatcaaaaccactcaaggtaacaacctttggcgtatcatcaataattagatctattccagtcaaagcttcaaatgaacggatattgcgtccttcacgaccaataatccgtcccttcatctcttcatttggtagatcaacaacagatacagttgtttcggcaactgtatctgccgcgctactttgaatagcatccacaatgacctgattagcataatgatcagctttagcttttacttcttcgttactatttctgatcatctcggctcgttctttgactagttcatcagataattgactaagcacaatcttcttggcttcttcctcatccaacttagctacgtcataaagcttttgccgtctagtttctactaattcttcagcctcagttaattttgcctttaagctagcatactgctgctttaattggtcttccttttgcgtgagtccactttcacgttcatctaataaagaattcttatgatctaaggtatcttcacgttgttgtaaacgatttttctcccgagctaaattatctttcttggaatttaactcatcctcggtcttttgcctaaaatcacgaatttgttcttgagcttcaagaattttttcttttttagtattttctgcactttgcttaacagccgctgctgcttgcttttgtgcattaacttcagcttgtgctgcagcaacctgtgccttagcatcagctaaaatgtggtcagcatcattctgggcattttgagctttttgttcccaagaatgcttgcgaattgcataaccaaccactgaacccaccaagaatgaaacaatggcagttgcgacgggaatcataattgttaacatattattcatgattactatcgccttttttagaattattcacacaacttttatgataaagaacctatctgttcatgtcaattaaatcaaaaaaccttggaaaataaatccagggtttttgacataattatttagcttgttcagactttttatctgtagcagcttctttttctgtcttggcttcttcgcgcttctccttgatcttttctggatcttcacgatcagcaattgacttttcatcaatcccgtaagcttgacgcacttgcttttggatatcttgataaatatctggatgctcttctagatacttcttagcattctcacgtccctgaccaattcgatcactcttgtaagagtaccaagaacctgctttatcgataatgtccttatcagcagccatgtccagtaattcaccactttgtgaaattcccttaccgtacataatgtctacttctgccaccttaaatggtggagcaaccttgttcttaacaactttaattttaactctgttaccaagaacatctcctgattgcttaatctgttcagctcttcttacttccaatctaatagttgagtaaaacttaagagcacgaccacctggggtagtttcaggattaccaaacattaccccaactttttcacgaatctggttaataaagatggcaatagttttggttttagaaatattacctgataacttacgcaaagcttgactcattaatctcgcttgtaaaccaacatgggcatctcccatctcgccttcaatttctgctcgtggtactaaggcagcaacagagtcgactactacaatgtcaattgccccactggaaatcaaagtatcagcgatttgcaaaccttcttcaccagtattaggttgtgacaaaattagtgaatcaatatctacacctaaagcttcagcgtaagcaggatccattgcattttcggcatcaatatatgctgcagtaccaccacgcttttgcacctcagctacagcatgaagggctaccgtagtcttaccagatgattctgggccataaacttcaataatacgaccacgaggatatccacctacaccgatagcagcatctaaagctaatgaacctgttggcactgttgaaatttgcgtatcagctttttcgcccatccgcattacagcacccttaccgaaattcttttcgatttttttaagcgctgcatctaaagcagcctgtttttcgtctttggccattaatgtcctcctatttttcgtacctaataattatactttgaccgccgtccaatttgcaagagaaatgcaaacgaacgttcaaaggattttttaccctctattatttattacgctaaaaatcgccattatttttttacaaaataaaaaaagaagcaaatgcttctttttaatcattcttgacttaatactattttacattgagcccttgaatacgccccatgattggtggaagtaatcgtaacctgagtaaatagtaaagatcaacgcaaggtaaagtaagatagtaccaatgtggaagaagtcaccaatcaataagaaaatgattgataacatttggcaagtagtcttaattttaccaggcatctttgctgctaaaacttgtccttcattttctgctaagatcaaacgcaaaccagtaacagccaattcacgacaaacgatgatagctactacccatgctggagcaagtttcaattcaactaagaaaatgaaagcagtcatagttaacatcttatcagctaatggatcagcaaacttaccaaaattggttaccatattacgtgaacgcgcaatgtgaccgtcaaaccaatcagtagccgaagcaacagcaaaaacgatagcagcaataacacgactccaaacaacagttgagcctgctgcttgaacactagcattcccaccaaaaatgatgattaacataaatactggaatcaaaaagattctaaaaacagtaagtttattaggtaaattcattctaacactcctagattttaattgttgttattatttccaccatcattgccattgttagtgtctgctgatgattgagtagtagatgattgttgagtttgactactttgttgggtttgttggctactttgagtagtagtagatgattgttgacgactgctttgacgagtagcactgctttgagtagttgtacggctttgggtagaactactattggttgtattgttattagtagagcccgtattattagaactactattattttgactagtagttcccttagccttaccaatcaacaaagtaattgtcctgtacgcattgtttgctgtatatgggattttcttacctgcaatagtgattgaagtaccattatcgttgcctaaagtaatcactactctctctgcattgcttggcaaagtcatagtgtgcttttgattagcaagtaaagttgattgccagctattagcattaccattgacttgtacacccgctgaaatattttggttttcaccagcacgcacaactaggcgacggtttttattcaagccagtaactcggtactcattgtcactaaccttagtaaccttaactttattgactactacttttttagctttcttagaagatgacgatgatgacttttgtgatgaaacagttacatcattattatcagcttggttcttttgaccacctgaagaaagacgagcatacaaaacgtacactacaagaattacgataattacaccaagtccgatcgcaattcgtggcaagtaattcttccacaaatttttcttattgtcggtggtttctcgtacttcttcactcttattatcaatcgagttttctacgtactcatctggcttagcttctggtacatcatcgtggtaatcacttaataactccttaccatccaagccaacaacttgtgcatattgacgaataaatgctctaacataaaaatcgcctggaagtttatcaaattcattcttctcaatcgcttcaagatatctgctctgaattttagtagctttttcaatatctgcaattgaaagtcccttagcctctctggcgctctttaatttatctccgatatctgccatatttacctcttcaaattttaatttatcatgttgagtataccataaaattctcattacaacgtcttagttataaaagccatccacctgtaacataaattgtctgtcctgttaaataactactacgtcgatctagcagtgttctaacccagtatgaaatatcactgccattggcccaacgaccaactgggatttcatcttttacctcttgaatcgtatcctcagaaaagaatgcattcattttggttttaaccgcaccaggcgcaattacattaaccgttaagttattggaagcaacttcacgcgcataagcctgagcgaacctggttataccacctttagttgcactatagacgctttctaatgcactacctgcaccaccatagactgagcctaaataaactatacgactaaaatctcgtttcatcagttgtggctctaacaatttagttaacttaattggcacagtaagattaatattaatcagatcagtgatatttgctaatttttcatcacctaaaaaaccatacttagtaattccttgagcaaaaactactgcattaactggcaacaagtttttaacaaaatctgttaactgtgcatcccctgtcgcaaaatccaactgtagcgacataaaatcctggtcaggatgcttagcaaacagctcttgaactaaattttcagctttttgagaattagaatgataatgcaagtataatgaccaaccggcatctgccaaatctcgacaaatatcttgaccaataccgccagttgcaccaaagacaattgctcgcttcaactttatcaaccccttacttgttttctaagtaagcagaacaaagttcactgtctttcataatcttttggcagtagtcataaaactgatcaaaattcatcgcctgcaatttagctatattttgtgttaaattttcatgatctaaattttcttcaattaattcaattgccaaataagacagatcattacttgtcctagcagtgcgtgctaaccattctttcttttgcaaaatgaagttttgtctaataaaacggtattccgctgaatttttcttaattggttccgtcaataccctctttatttctgcaattacttcttgagcttgaggacttacaccaaaaatagtagcaaaatcgccctgcctggtgtaattaacagaaatctgcagcgaatccattaacaactgcttttttctcatttcttcaaaccatggtcccattgcacttagttttgattctaacattatttctaacagaatttgagtcaaatcaaagcttaataatactttcttaaagtttttaaagcgaattcctaaaccaaaggaattagaattacctctggctggcaagacttgatcatgtaacatgcgaaaactaacttgtttttcagctgtgcttttacctttcccgtgcaaatatttttgctgcagctttcctacttgccgcaaaatcgtttgcacttgattatcagaaaaatcaccgcaagcaacaaattgcatcttttctggcacatacttagcctcataaacttgggtcaagtttttcactgtaacttgattaattgattctttcgtacctacaacttcgatccctagattagaatcaccaaacatatcatgcataatcgcattatttacgctccaagttgggtcatcctgatacatggccaattcttgttcaataatcggagcctcttgcgcgatattttccttagtaaaatacggctgccctaccaattcaaacaagagatcgatcattttaggcgtatgctcaattccactacaataaaacattgtttcattaaaagacgtgaatgcattaacgtcagcaccaatatcttcaaattgcgttgacaaatcaccatcttttttggcaaatagcttatgctctaagaaatgagccgaaccggcaaccttttgtggatcactactaccaaagtcaacaattataccgaaaaatcgttgataaaaatgtggctttaaaataatttcggctttaaagcctgactgatattcttttttgataatttttggtgtcatcattttaaaacataactttcattaaagaataaattttgtgcgaaagctactaactgcttaggtgtagctctcctaattgcattttcacgatcaaagtctaaatatcccgagaacaattcatcacgcaacatttgacccatctgccagttttgaccgtctagaccaatcttcatattacgcaaaattgcctttttagcctttttaaataaatcatcttctacttcgccctgaactagtttacccatttcggataaaataatttttcgagccgctgcaatcttactaggatcaagtcctgcactgactaaaaacaaagaattattggcaaagcagcttgcttcaacattataagctgctcccaattgctcccgaatttgcgtaaataatttagatgattgatcacctgccaaatattgcgataataatattcccattacttgaccgcgataatcaatactttgttctaaaccaaagcccattaacaattgagcttgcacatttccttgatcatcctctttttcaatcaactttcttttagctggaatagttagactagctgtttgaaatgatttagttaaaccagtttgttgaaacatagcctgagctaatttagaaaccagattattatccctggtcattcctaaaatttgcattggtacattagctaaattacgccaataatgcatcatagtcgtgctagtcgcagctttgatttcatctagtgagccaataaatgtctccgcataatcaggttgatcctgataccacaatttaaaaaactgctccaacgcataattagatggttgttcaatcagttcttgatattcttctgctaattgacgtttagcatattccaccaaaggttccgcaaaattaggttgattaactatttgtgcaatcacattaagaatttcttcatacgtataatgtggatccaaaatctcaatcggctcaacaaaattggcataataagtcaaaagtatttctttaccaaaaacttgtggcataatctccagctgtaaatcatataattctgccaatcttttttgttgtaaagcaagtgacggataacttaagctgctattcatctgtattcgcgctagcaaactagcataagctaaattatgtttagtcagcggcaaacgcaaaaaacagccaatagcggctgttgtaaactttttattttttctaattgcaatattagttgtgagcattgtttgaattaccttcattctttattggtggcactaaaacttgtcgtggcttagagccttcagatggaccaacaatccctttagcttccatttcatcaacaattctagcagcacgattataaccaattctaaacctacgctgcaacattgacacgctggccgtctgttgacgtcgtactaaatcaacagcttgctcatagaattcatctgctggctcatcatctttactatcagcatttgatgaattttcaccttttttaggaatcattgtctcatcataactaacctcttgttgcttcttaacccattcaattacgcgttcaacttcatcactagcaatataagcaccttgaacacgttcaggtttagatgccccaattggcatataaagcatatcaccacgaccaagtaatttttctgcacctgtttgatccaaaatagtccttgaatccactccacttgatacagcaaaggaaattctcgatggtacatttgctttaatcaaaccagtaataacatcaacacttggacgctgagttgccaaaatcatatgaattccggcagcacgtgccatttgtcctaaacgaacaatcgcgccttcaacatcgtgaccaccaaccatcatcaaatcactaagttcgtcaactacaactagaatataaggtaacggcttcatcactggtttagttttatcacgattgttttcagcaactttttgattatattcactcatgtttcgcacgccaccagccgcaaatagcttatatctgcgctccatttctttaacaactttgcgcagtgcatttgcggctagcttagcatcggtcaccacagggatcaataaatgcggcacaccattataaactgaaagttcgaccatcttggggtcaattaaaactaatttaacttcttcaggccgcgccttcattaaaatactggctaaaattgtattaatcgctacggacttaccagaaccagttgaaccagcaatcaataggtgtggcatcttagctaagttggcagaaataatgcttccagttacatctttacccaatggtacatccatcggatcgcttttggctttattatcttgatgttccatcacgtctttgaatgaaacaacagacgttgctcggttaggtacctcaattccgataaagggcttaccaggaattggtgcttcaattcgaatatctttagccgcaagcgccaaagccaaatcatccgctaagtttacaattcgacttaccttaacgccaacagctggctggacttcataacgcgtaatagttggtcctaaaatagcttttttaataatcaccttaacgccaaaactcttaaacgttgattgcaaaacttgggtatttttcttaattaaatcacggtcagtactctgatcagtcgatttaattggatcaagtaagcttaaaggtggcatcttataagctttattgactggcgcatcagtttttagttcaccatgatcgacatcggctaattcctgctttaacttttgatcatcttccgcaaaagaatgtgacttaggtagttcctttaccccgtcatcatgttgtggtgcaatttgaatttgcggttctggatcaggtgtggtctctggctcaacttctacgtcttcagccgtcggcgttacatcgtcatcagttggatcggcagggtcaaagtctgctacattaggaaaaatcggtttatcgtcatcaactaaatcttcgtcttgttcctcttttttctgacgccgcttttccaaaacgtcattatatttatctttgacctttaccccagcttctttattctttttgatgaataattgactaactgtctggaatttttcgataattgttctaaatttaacatcaaaaaacatcaaaattccaattggcagcaataaaatagcaaaaacacggacaccgatttgccctagtagtggataaaaaagttgataagctaatgaaccaattaatccaccaccaatgctctcagtgactccagcacgaccaaactccgcggccattgcatgccaaaaagaattcaggaaattactgttaactaattcatgttcaaaatacaagttacattgaattaacagaattcccaaaaaagcgattgctaaccccaagctacgcttaattgttaagtgaatcggttgattatagattaaatttactaggccaaaaagtcccagtaaacctgccgcaaacaaataagaatccccgaagaacattcgaatcaaatttgcgatttgcttacccaaaataccgaaacggacaaaagccagccccgctattaaaatcaagactaaaccacaaatactccaattaagattttgctttttgtttgcttttcgcttattgtagctctttttggcctttctttgtttcttttttgcaggcatgtactcacctgattaattatcgaattcagccttgaagttcaagttaaccggctgacccaaagttaattgggttgtttcatagatcaaggtctcaagttgctcaactaatggtcgagttagtaactgccaatctgaattactaatgtcagagccatcaccatggtaatcttttaattgcacgatttgatgaatcaagccgcttgcttcaaacatagctggtgcaggaattacatcatattgaatagcaacatcatagtaactaccattttcttctgaatgctcatcgtcaccgctaacatctaattttctaattcctggtctaacgtcactaattggtttggtatcttcatcaactaaatcataatgaaatgcctgtacgataatatctgtctgtttttcaaaatccattatttattctcccctagattacgttcatatctttcaggacgatcatagtcatcttttaacttgtcattttcataatgatgggttgtttccatattaggaaaaccttgctggcgtaaagcttctagcaaaaccattgctacagaattagacaagttataacaccgaatgttatcagacattgggatacgtaaattacggtcatagtattcacgcataaaagtttctggcaaaccagttgtttctttaccaaaaacaaagtaataattcttgttaggatcagtataatcgacttgtgcataattttttgatgagaatttagaaattaaatacatctcatcattaggccctaaagtcttcaaaaaggcattcaagtcatcatgtctgcgtacatcgaccttatcccaataatcaagacctgctcgcttcatttttttattatcgatttgaaaaccaagtggttcaatcaaatcaaggacagtgttagtccccgcacaagtacgagcaatattgccagtattagctggcatcaatggttcatacaaaactacatgattagtcattcaaaaaactccttatcaaaaaaagcgtagcttttaagccacgctttaaaactatctagtatttattcgctttcgtcatgatctgcatcccccgtggtcgaagaaacagcattctcttcaaagagtttagactctcttcgataataattgtacacgcgagacacaataatcttcaagatcgcataaattggaataccgaaaactacaccccataagccccagacggcactagcaccaatcaagagtaaaattgttgtaattgggtgcatttccattttattccccattacccatgggctaagaattcttgattcaattgtttgttcaatagcaaaaacaattaagaccttaattaacattgaacctgaagtcataattgaaattacaattacaggaatcattgctaatggtgtaccaaagtatgggattaagttcataaacccagctaaaattgccaaagccacgccatatggtaaaccaattagaatgtaacccaatgagaacatcacacctacccaaaaggcaacagtaatttgaccacggacatatgaagcaacagcatagttaatatcatataataatttgctaaaactaggttgccatttttcaggtgcaaacttggtaatatatggccgcagttgatgaccatcttttaacatgaagaataaaataaacggtgcagttaacaaagtcatagccaccattgtaataatgctgacggcagatgaaatattgccgatagttgcattgatggtactttgtccagacttaaataaggtcttctgcgtattatcaatcatgcctttgatactgcctttaaatgaatgtaaacgcggatcttgcaacgcattttgtgttgcattaaccgcatcattccaaatatgaggccagttctttatcaatgaattaatctgattctgtgcaattggaaccaagatattaataatccaaattaatgcgacaactactagtaagaataaaactataattgtcaccactcgcggaatcttaaattttctttcacaccaatcaacaaccggattcatgatatagtactgaattaccgctaataataatggcggtaaaattgcactaaagaagatccaggcaggattcaatacaaaagatactttattaaagacccaaataattaaaaagaatagcaggacgtttaataaaacaatactaaaacgattatctaagaaccattttttaaaaacagttccacccctatgttggttattttccatctattcatcctaatttttaaatgtgttcataaacaatatcatcatcaaccttaaaattaggtaatggttgatcaatatccggatcaaagtagatcgcattagcaagtggcgtcttagaaacgggacggttaaagaacaaggttgcgtgtcccaatgccttcatgttgctctctaccatcggaccaacatagtttgcaacataggtttgaccatcaacagtgattgtatcgccttttttaaaaacaaaaccactaactggcgtctcagtactgaatttttgaatgacagaaacgtcttccaaatccttattagcaccctcgccaaataaaattaccatgccatctttattatcgacggcctttttaccaatttttttaatatttgcaatccatttcataatataatctctccttaaaaataattttagcataagaaaagctgcttaaaaacttaagcagcccaaaatcggcgattattttttgctcaacaggaaatcgtgtttttaagcgtctaatccgctttcatgctatactttattttagacttatttttatttagagatggaggcccacacatatgaaggttttaatcggaggttacaccaaaaaaacttccaaagggatttatgaattacctattaccagtgcagcaaatgatgcccgtttaggcaaagctgagaatattattagcgttggtggtccaacttatttccgaaaagatggtaatttaatttttactgttaataacgctggcgataaaggtggaatcagcgtctttcaattaagtgatcaaggcgcaaacgaagttgaccactatttaactccaggctcttcgccagcttatgtaggaattaaccgcaccaaaaagttgatttacactgctaactatcatactgctgtcttgtccgttttccgctacaacgacagtggcaagctcgatctagttgatactgtaactcacaaagctgaaacgttgggtccgcgtcctgaacaagttgacggtcctcaccctcacttctttgatgaaaccccagctggtaacttggttagttgtgatctaggcaatgataccgttgatttttatagattagaaaatgatcaattaaaacacattgctcaatataagtgcgaaactggctttggtacacgtcatatcgtcttcagtaaagatggcaattacttctacgttgtcggtgaactttctagtcaaatcaatgtcgttaaatttaacgaagacacttgggactttgaaaatattgctacttataagacaattcccgctgattttactgaccataacggagctgctgccttatatattagtcaagatggcaaatatgtttacacttccaacaggggacataattcaattgctgtcttcaaagttaacgacgatcatactttgagcctggttcaacgtgtatccacttttggtgacttccctcgtgattttaattgggataaagatcagcgctacgtcgttgtcgctaatcaaaatacagataatgctactctttacacaagaaacgctggtactggtagcctaactcctattcaaaaagaaatttccgtaccagaaggcactcgcgttcttttcaccaaatagtaattagcattagtaccaaagtcatggcgcaatagaacgtcatggcttttttattcctacaacttaaagtaaaatagaaataaatgaaacaaaatataagtcatgtggtaataagtcaaatgaaaggcgatgatatttgttctttttgatcataaatttgagtatatgaaactaagccttggtaaaggttgatttttttaatgttaaacttttgtttacttttaaatttagaccaatttttgaaattaagacctcggtgtcctgtacagtttgtcatctttgagcaatttaaagataactcgtactaattttcttgcagttaatgtgcaagcacgtttatgcggcgagtagacagcttcatcatacttcttttggtaatattttttgaaaacaggatcatgtaatcttgctagattggcagcttcaatcaagtaatatcttagatatctgtttccagtcctggccattggagtatgttcgttgctgtgatctcccgattgatattgattccaggttaggccggcatacttagccagctgttcttctttatcaaagcgatcgatacttccgatctcagcgataataccagctgtataggttttgccaataccgggaattgattccagaattttgctttctggtaatgcatcaacgatacgatcaattgctttttctagatctttaatagattcattaaagctttgaatcatgttgtaatgaacagaaagcactgcatcaattgaatcagtcattactttgcctaagcgatatgaacctctaacagctttcttaattgctttagccaaggtatctggatcggaaaagcgtcctctgcctttaacctgtaagtaagaaattaagtcttcggtaggcatatccgcgatctcatccagagttttactatcggttacaatagacatcattgtagcaccgaaaagaggagtattaatcttatctttatcgacagtgattagtttattaacccgataatataaagcttcaatgaagtgctgtttggtacgagtcagttcttgaactaattcatatctggtacgcgttaaacgctctaaagcaagatagttgtcttgtctggcaatgcttactcgataatgtccaaagcttagatacaaagcaatgtaataagcatcgagaggatcagttttactttcttcaaagactttatgaaacctgctggtttctttggggttaattacatcagtctctacattgagcttttgtaaatcttcgtcattttggaaaaagtaagcaggatgaaaactgtaaatagatgtagcttccatgccaataatgatttgatcatagtgtttattttgagctagatctaaaatttgttttttcagttcactagcaccataaagatcattgacaaagctatcgttaattaagcgtttgttttgatcttctgaatcaagtgcaacgacctgtaaatctttagaactaacatcaataccgacaaataatttcattggaaatggcctcctttctttcaaatttctgatcatagattttgatcttcacatgttaacccctaattacagttcttaagttcaatctcgccagtataagtattcactggttgcttctttgaaagctgcacctaatcccaattgctcaaggactagcaaaaagaagcaatcaatacagcatgtgagttagagcataaaggaactgtctgggtggcagacttataaagcagacaaaactgcaggaggtgataacctagaccagttgaccaaagccaatgacaattagaggctaacatgtgaagatcaaaaagcaaatactaatttgattaattatcacaatatgactaattacaatttatataatacgagaaggtgacaaagtgaaaagaaaaataattcgaatattacttttcattcttggcgggatattagggttactacttctgtataaactctatttaaattaccgtcctgaattgaatttattacttcattttgatcaccataatgaagaagtactcgttaacatggtccgtagccatggtattgaagacttagcctttttatttttacttaatgcgatctgtgtagcaattcctggcttatccaacggaatcttttgtgttctcaacggaatcctttatggccctgcctggggatttattgttaattggatcagtgacattttaggccaaataattttaatggaacttttgcaaaaactctatgacatgaaaaagatgtctaacagtaaagtttataagttattgactggattaaaatcaccaatgcttggattaattattggatatatgattccatttattccgagtgcgacagttagctatgtcaacattatgattaataaggagcaacgtaaaaaacagctaataccaatcattatcggtgtcatccccttcgcttacttatatgcttatggtggcgattcaatcttgcacttagacggaacacgattgattaaagttgtaatctcattcgttgtcattgctttaattgcagtagctattttgcttagtctgagagcaatcaaaaagcgtacaaaaaagtgtctgggaaaaaactaagtctcagatcatgaaaaaagaacgttgaatttttgtttcaacgctctttttgtatacttttagctccagccttgatattattaaatcatcacaaaataaaaaaggtggaaactaacatgtacaagaattatatcacaggtcaaactgctttaacacttaatctagattttgccattccggccaatcatttggctaatgtcatcagctggtttgtagattcaattccagaagatgttttagtaggcaagactgctaaaacgggccgcccagcctatcatccagccatgatgctcaaaatactgctttttgcttactccagaagagttttttctggcagaaagattgagttgatgctggaagaaaatctgccaatgatgatcttggctgaccagcaaaagatttcatatcatactatcaataattttagatcaagcagccatgccaatgaactgattaaaaagagctttatctacttcactaacctgttagaagatgaaggcttaatcaatgaaggtgctgcttttatcgatggtactaagattgaagctgatgctaaccgctatacatttgtctggcgcaaagcggttgaaaagtatcatgaaaagctgaaaggccaggcagttgaactttatgatgaattgattactaaagaagtagtcaaagaaatggaaaaagaaaaagttcaaactagtcaggggctaaaggaattagctcaagaaactgaagcagaaattaacaagctgactaaagagattgagcaggaaaacaaagccattcctggcggttcacctcgaaaagccaagcgacgtggactaaaaaagattctgcaccggctaagaaaagattatgtgccaagaatgcaaaaatatgaagaagccgaagagatctttgccggacgcaacagttattccaaaacagatcatgacgccacctttatgcatatgaaggaagaccacatgaaaaatggtcaattaaagcctggctacaatattcaagcagtcacgaccgatcaatatgtagttgattatgccatctttcctaatccgacagatttcaaaactttggagccggttttggatcaaatgaccgtgttggacaagtttgacaaaatcgtcgccgatgctggctatggcagtgaatacaattattcgatgctggaggaaaaatatccagacaagaagtactttattccctacactatgtatgaaaaagaacagaccaaaaagtataagaatgatccaactaagctaatcaactggtactacaatgaaaaagatgattattacattgatcatcatggcgtcagattcaatttcaaatattacagccagcgtaaggatcgttctactggtcaggtccgtgattttaaggtttatgaggcagacgagttccagctaacgccagaattggaacaattggctaaaacagctagcggccgccagcgccaagttcgctataatcctaactggcaatatttaaaagaaaaagcaaaagaagttctccaaagcgaagaaggcagacacatctatggcatgagaaaatatgatgtagagccagttttcggacatttgaagaacgtatttggcatgcgcagaacgcacctgcgaggtaaagagaaggtcgaaaccgatatcggaattgcctttatgatgatgaatttgaacaaatattgtcaaagaaggtggctgaagggccgatttttattgttaaaaattttaaagagaacaaaaaaacgatcaagattcttaaaaaaggaaatcttgatcgtttttattcatctggaagctagttttttcccagacactttttattatgcctagcatatttaaactaagttagcttcttctaacagttcttcgacccaagttctcttgattttcttcatccctgttttgagagctaacttctcaggtaatggcatctcttgatcaactaatttcttcttgtcagacatgtagtacatcgcacgaagcaattgacgaatatcataaattgagtcaaatacttcaggtacaccacggtcaacgttaagcaatgtataaacagcttccatggcagttctgacagaatattcggtggtaaagacagtgtctctagttggtgattcggcaaaattgccaataaaggcaatattaactgatccttctggaacaacatctggacggtccccatcatgacgaggcataaagtaactagtgatatatggcatgtaaactggtacggtattcatattttcttcactagccaattcgctgatttgactctctggcacgcctaagtgatagagcatttcctcggcaatttctttaccagtacagtcaacgactctcttcttgatgtaattaccctcagtatcagaatacaaagcataaatccaaacaacgatttgatctggattctggctcttaaagtgaggttgacggtgaatagtaaagctaagttcccaattagagtcaacaacagtgataattccaccagtattaactttaccatcgtaaaggctgcgcttagtcaagcgttcaaagtatggagctattttcttattttccaaggtagctgtagctgatacgaaccaactacgctctggcaagttttcacagaagacatctggatgaccaaagtcaggatcttgtttagccaaattttcccataatttccatgaagagcccttgtcgtgagtaattggtgctggggtattttgatcaccataagtagaactttcagtgattgaaccgttagtcacaaagacaatatcatctggggttaaatcaatatcactttgctcaccattcttggtcatcacgatcttcttggcaaccttttgcttgccctcatgatcaacaaccacgttatcaacgtgacaatcatattcaaattgaacaccgtgatcttttaaatatgccaaaagtggcttaaccatggactcatattggttatacttgttaaacttcaatgcggtaaagtcaggcaaaccatcaatatggtgaataaagcgcattgcataacgccgcatttcggctgctgagtgccatttttcaaaggcaaacattgttgcccagtatgtccagaaattagtcttaaagaagtcatcactgaagaattcttcaattgtttcaccttggagttccttttccggtgtcatgattaacttcacgatttcattagtgcacttacctagaccatattgaccatcacttggtaagcgatcaccgcgattataaattagacggcaattggatgagttaggatcttctttatcaagccaataatattcatctaagtatgatgcgccagggatttccaaacttggaatcgatctgtacatatcccacaaacattcaaagtggttctccatttcgcggccgccccgaaccacgaaacctgcattaggacgcttagcaccatcaagtgaaccaccagctacgggtagctcttctaaaatatgaatattttcacccttcatttgtgcatcacgaactaaaaagacagctgcagaaagaccggctaaaccactaccaataatataagcagattttttatctacgcctgcgggctttttggcatccgcaaaagcctcataattaccattggaatagtacataaagatatcctcttttctgtataagtatagtttttaacattacactttaattataaagaaagcggttactagatgcgagttttttagaagttttagctaataactttagaattctttattaattagtttctgccacagttcttgcatatcttttggatcattcaactcaattgttttacatttttgctggctaaatggatccggaaaatttaaataaaagcaatttaaggcttggcgtgaaaacccatcttgaattccatataaaggatcaccatataaggggtgtcccagataagccatgtgaacacggatctgatgggttctaccggtaagcaagcgtaactctaccaagctagcacctgtaacctgatctaggactcgatacgcggtttgagcgtcctttccatctgccactactgcacgtttaactccactaccctttttgccaatcggttgatcaattaaaccagttaactcattcggagcaaaattgccatgtacaattgcatgatattttttgacaaatttctccttgccaattttactaaaacgagcatgggaaattgcatttttccccaccaatactaaaccagatgtatctcgatctaatctagtaataacatgcggcttcaaatttttctgtcctttttgggcaaaataacccaacaatcgattgaccaccgcatcatcatcttcatagcgtgagggaattgacaacacacctgcaggtttgttaactacaagataatttttattctccaacacaattgatactggattattcgatggctttaaaaaatcatttttcttttcttcaccactgataaaaatcacttcatccccagcacgcaaattaaagctagtatatcttcttttatgatttactaaaatcatgccatgatggtgtttagcattgtttaacgcttgatgcgaaaaaccattttttaacaaaaaaggacccagctttttggggtctctttcttgcacaattagtttaaataaactagtcatttttttcattatctccaataaacgcattttgtacgcgtgaccaaaaatgatggtggccaaattgatcaaactgaatcgaatgccgcgaaattcgatattcaatcttcttagcattacgtacatcaattcttgctccatcaactgtcatcacaaaatgatctgcattaggaacaatcgaaatccattgatcaggcgcaatcacaattggtgatgacaaagttctaaaaactcgattattaattgaggcaatttcagtcatttgcaacgcttttagccggggatgaattactgcaccacctagtgatttgccataagcagtcgaacctgttggtgttgaaacgcaaagaccatcgcctcgaaagttttcaaataattgatcattaatgtacacatcggcctctaatgtatgtgaaactcttttaaccgctgattcattgacggctaaatggtaatgagtttcacctgattcagtgagcatctttatttctagtaaaggatacttcgctggttcacccttggttactgctaaagcatcaaccattttttcaatatcatagttacgccaatcagtataaaaacctaagtggccagtatgaatcccaataaagcgcacagaatctacttgattttcatagcggtggaaggcattgatgagggtgccatcaccgccaacagtgatcactacatcaggatatctagcatcaaagataaaacctttttcctgaagcagcttcttaagctgcgcaactgtctttaatgtttcatcatagttattatgcgctattgttactttcataatttttctttgcccttatttttggtaaaaattttctgagcttcttggacctcatccttaattgacgacatttcttcgtctagtctataagcggcttcagccgttgattttaatctagctgaaatgtcatcaggatagacaccttgatatttgtaatttaaagtatgttcgacagtagcccaaaagttcattgccatagttctaatctgaacttccgcaattaattttttcggaccttctggtaagtaaaccgtatagttaatcaccatgtggtatgaccgatatccactcggcttagcattttgaatataatcacgctcctcaacaacttccatatcatctcgagcatgaatcaaatctactaccttataaatatcgtctacaaattgagtaacaatcctaatccctgcaatatcttgcatatcagtctcaatgacatcaggactaattactcgccgtttcattttttccttgatagaatcaactgtctttacccggccaattacaaattcaataggtgaatgttctcccttagttaaaaagccttgtctaagggaacgaaatttaacctttaactcgcgaacagcttcgttataaggccacaagaagttatcccaatctaattccatgagaaaacattcctttcttaagcaaacaaactcattttaccatataattaagttaaacagttcggaggaaaaacagatgagtaaaaatcgagaaattgaagcaaaaactcttttaaataaaagcgtttatgatcagatcactgccgcttttccaatcaaaagtgactttacccaagaaaattattattttgatacagcagatgatttattaaaaaatcatcaaattagcttgcgtattcgaatctatgctactcacgcagagcaaacaatgaaggtaccggatcctaatcctgtacaaaagaatttccatgaagtaattgaaattaatgatgaattaactcacgctcaagctaaaaaattagtagcaaaaaagcattttaaattcactggtaatattggcgcatatctagataatcattttgccaatgaccaaaaaaagctacatcttttcacctggagcaaaacccgcagaattttgatgaacgggccacaaaactgtgaattaactctagatgctacgtcttatccagataactatcaagattttgaattagaaatcgaaaatactaatcctgctttaattcaaacagtattaactaaacttgaacaagaatatgactttgaacaaacggctgctaacactaatcaaagcaaaatagctcgtgcaagcgctcaccaaaaatagtatatagaaaataaggcatattttttgtcacttattttttttcttgctaaagtaactaatagtaaatcaccaaagaggtcgagattatgtttgagatttttctattcatcaatccaatagggatttattgttatgacactgaaaaacagattcgtaaaaccgttgatgaattaggggtcgacgtttgttatcactatattcccattgcaaatgtttgtttaatcaatgatgatgcgattcgccgacgcaaagatgaccagaagttgcctgatattagtaatttttctagagcaacttatgaagcattagaaaattaccacgcgattaggctggcctatggcaacaaaaaagcccgtcaatacctgtatgaattacaaaaaaacttgagcaaagatgcttcagcttatacacctgagctgcttaagcggatcgcaaacaaattacatatcaaggatgcggatattcaggcaatcaaacaaactgattacctgcgtacttctattgaagaagatcaaaaactagccaaccaatggaatattaaagctactcctaccaccgttatctttaacgaagacaacgagcaaaatggagtattgctagagggaccaatcaatcaacaggatttagttaatctaatgcttccagattgtcaaaagtgtttttcagactatttacctgcggagcatcatttacgccttatctaaaggcgttttatttttgcaaaaaatcactaacccgatctctttcacctgggttacgccaagtagcaaaaactttatcaggtaaatcatcaagagttaatttgcgttcataaagcatctctcctattttcaatcctaacttttttttttgcataatttgctggcgtaaatattttctttgagttgcaatgttcaaagaatattcttttttgaatggcttaaagcgccaaaaatcttttatccccaattcatcaaggacaaatgatttactttgataaaccaatttattagctaccggttcttctaaaacattatattttaagcaaaaacgatttctctgtggattaatttctaaatagtaattcccccaagctttattttgtcgaaagaaaatcaactgtgtgcgtttcaatcgccgtttcaaatagtgtcgctgtcccacaatccaaatatcttttacaccaattttttgataaagctgatgccgatggttaaattcttgttgactcaacggcgcacattgaacttcaaacgctaacttagcagttgctaagacatctgcacgcaattgtccttcagctaatggaatctcaacttctgccggaaaaccagctgccgtcaaagctgacttcaacagcattttcgattggtgatgctcctctttttcacccattaaattactgtacttcacaagatgcttaaaaaaggctgctttttgctccgacataaccaaaatcacttttttattgcaatgtggacagtgataattatcacgattcaatttcttttgccttgcattaactaaacatgcttcgtcaactgcaaggactaatttcttatttaacatggctgcatacatttttctcacccatgttttattacgtaaaaaagagacggaattttgtcccgtctctttttctttaaagaatcttaataattagctgcttttaaaaagtaatgtcgaatctggcctaaagcattttgcatcaataagcatttgcctgtttcttcaactacacgcatcttatcactatcgaccttaaaaccaaattcgttggctattgtccacgcatctgctggtttaagctcctcatattcttcatcaagaaatgccaaatttaagaaatattgtccatgcaagtaatacaagctagaagctaaatcatttgccttaaggttatcagctaattcaattagactacctaaatcatcaaaatagtaagcctgagtcttgcgcgatctccaatcagttggctcattgtttttatcatcttggttaaaaaagttgtgagtagctggtccttgaggagccgaatttgaattcgtactctcctcatctaaatcaaagaaactttttgaatcatccgaattcgttgatgattgctcatccttaggaaagctatcacccattagtttccttaaattctgtgcatcgtccggcttaactttggtgatcatcaaatctaatcccccattattaggcattacttgaaatgatactggatcaccattggcaaattcatggtcttcatcgacctcatcaagaattttatagaagaagtcttgaatcttttgtctattacctaataaatcaagcattcccatcccacgacgagccaattcagctttatcaattcgaactctgatagtattcttatcaatatgatctacctgcacaggatctcacctccatgaattaatatatctattgtagcgtatttttcgtttaaaataaaagtgttagtctcaacaaaagccttaactaacacttttcaatcattttataaatctgcaatcttttgtgcttcagccaattccaaccgacgaacttttcgtggcaagaatcgacgaatttcatcttcattgtaaccaacttgaagtcgacgatcatccataatgattggtcttcttaacaaactaggattcttttctactaaatcaagtaactgatcaattgataaatcgtctaaattgattcgcaattgttgaaaagctcttgagcgggtagaaatgatttcctcagtaccattttcagtcatccgcaagatctttaataattcttttttagtcaatggttcagaaaaaatgtttctttccttgaatggaatattatgtttttcaagccacgctcttgccttgcgacatgaagtacaactaggagagacatataaatctaccataaaaatcacgctcctcagaacaaatatttgtatacgtttctttactcatagctagtatacccaatgtcattaagttaagacattgacaattaagggtgcttttttagagatcgaatcatttggattcgatctctttttttgtataaaataaaggcgaaaagacctgccttttcgcttatcttatttatatattttaaaccttcaaaattattgccagaaagctggtgttaattatgaaagcccttcataagaatattctaaaacgtcttgatcaaattatcaataatactggggatcatattcacgattttattaataatcctcatgcttttaccaggaaacgcactttagatgcagcgacagtccttaaaactacaattaacatgcaaggtcagaatttaaacagtgaactctttagagcttttggcgaagatgcaactaaaaagaacgataaagtagttagtacttctgcctatgttcaacgcaaaagccagctttctcctgcttgttttaaacatattctgactgtttttaatcaagatctatttaatattcaactttttgatcatcactaccgtttgtttgccattgatggctctgactttaatcaaatctggaatccgaaatcgaataacattgtacaagcttcttctcataaaaagaaaccctattgtcaaattcacgttaatgccttatatgatctattgaataatacctaccaggattgtatttttcagcctaaatcagaaatggatgaacgcaaagcggctgttcaaatgcttaaagctttgaattgtggtccatatattgtaacaatggatcgtggctacactagtttcaatatgattgaaaactgcaatcgcctgcctaactgtcattacataatacgaactaaggctggacaaggcggagttaaagaaataacgacattgcctgatcaagaatgtgatcgtgagatttcctgcctggtaactacttctaactattactacatcacgcataaagccagtgagaatattcaccatgtccagcatcattatcgccaatatattaagtatcgctctaaaaatacccaggatctaagctgggattttggcgagttatgcacaataaaatttcgagcctgcaaatttagaattaacgatgccaaatcaggcaaagaagaatgggaagttgtgctaaccaatcttgatcgaaaaaattatccgctaaaaagaattaaagagctttatcatctgcgttggggtattgagacctccttcaagaaattgaagtattctttaggcagcgtacagttccattccaaacaagataaatttattgaaatggaaatttatgcccatatgattatgtttaatgcaatcagtcaaattgatgcacaggcctatattccgcaaaagcattgcaagtatcaatatgccatcaatttcaagcaatcatgcttgattattcagagcatgtatttggcttcttctttaacgcaagattttgaacggatccttattcagatcagctattataccattccaattagaccaggccgcaaggacaagagaaatattaagcccaaatcagctgtatattatttatatcgcgtagcttaaaaaagcagaatctgtgctatgcattatttgttgtacgaaaaaagcaccaatttaaccaattaaatgttaaatcagtgctttaaaagtctaatattaattgtcaatgtcttaacttaatgacattgctagtataccatataagcttctttttcgtaagtgcttaatttatcgtttacctctgctatttacttaatactaaagataaaacgtgaattatttgtgaagatttcgttcgttttgtttaaaattattaaaaataaaaaaagagacatcacagtctctttttgcaaattaaaactacttgttcaattttttcattaaattattaactaatttttcgttgtcttcagcagtttctgatacataacaagcttcgttagctaattccttaatgtcagcagtgttcaatttcttcattaagcttctgatacgcaaaattgaagttgcactcattgagtattcatcaagtcccattgaaagtaagattgggaacatagtgttatcaccagcagcttcaccacacataccacaccaaataccgttttcatgagcaccatcaatagtgtgcttaatcaaacgaagtactgatgggttatatggttggtacaagtatgacacattatcattaccacggtcagcagccatagtatattgaattaagtcattagtaccaattgagaagaagtcaacttcctttgcaaattgatcagctaaaacggctgcagcaggtacttcaatcatcataccgacttgcaagtcatcaccaatcttaacgccttctttagcgagcttatctttttcttcagctaaaatttgcttagcttcacgtaattctgctaaagtaccgatcattgggaacataattcctaatggaccgtatgcagatgcacgaagtaaagctcttaattgagttctaaagatatccttgtattgcatagaaagacggatagcacgaacacctaagaatgggttcatttcttctggaagatcccagtaatcaaggtgcttgtcaccaccgatatcacaggttctgataatggtttgtttaccattcataccttcaataacttccttgtaggcatcaaattgagcttcttcagttggaaagtcactagagtccatgtacaagaactctgttctgtacaaaccaatggcttccgcaccattatcctttacacctggcatatcattaggtgtaccaatgttagcagcaatgataaatttcttgccatctgcagtaactgatggttcattcttaagcttagcccattctgccttttgcttaaggaatgcttcactcttttgcttgtaatcagctacttgagcgtcacttggatcaataattgcatccccgtcaagaccatcagcaattaacatatcgccgttcttaacatccttagtaattgagtcagtaccaacaacagctggcaattcaagtgaacgagccataatagctgagtgagctgtacgaccaccaatatcagtaacaaaacccttaacatactttttgttaagttgagcagtgtcacttggagttaagtcgtgagctacaacaattacttcatgatcgattgaagcaggatttggtaattccttaccaagaaggtgagccataatacgctttgaaacatcacgtacgtcagcagcacgttcttgcatgtaaggattatctgtcatcccttcaaaaatagcaataaacttcttagcagtctcatcaagagcagcttctgcgttgatctttgaatccttaatttcattctcaatggcaccagtaaattctgggtcatttaaaatcattaagtgtgcttcaaaaacttgagcttcttcatcgcccaagctttctttagcaatatcatgaatcttttcaacttcagcagttgaagtcttaattgcatcgttgtaacgagctacttcagcttcaacatcagcaattgaagatttagagaatgaaagatcaggctccacaagaagatatgctggagcaatagcgataccatcacttgcagcaattccttttaaagtcttggtcattattcagctaaaccttcttttttcatagtgtcggcaattgcgtccaatgcgtccttttcgtcatcaccttcagcagtgatagtaacatcagcattttgaccaacaccaagtgacataacacccatgattgacttcaagtttactgacttaccgttgtattccaagttaacatctgagccaaactttgaagcagcttgtactaaaagagtagctggacgtgcatgaatacctgtttctgcaatgatatgaaaatcgcgtttttccattataaatatctcctttaaattgaaaaattaaactggtaataaatacccattcgagtattagattatcatgtttttacagattagacaactgcaatgtaacagtttacattatttattcatcggtattcgtagcggtatacacaatcgcgccgcctctttctgccctaccggtaatatattgtctttttccataatttctaatagtcttttgaagatcaaacgcatcttttggctcaactttatactcttttatctcacctgagactaattgatctagaattttctgataatccaaaaatatcaccacttttttaaaattttataatttttccactattaattctactatttatattcaattttcaaaaatattaatattttgtttgcggtaacaaaagcatttcttacaaaaaataagtgtttgagtcttagcacttgactaccaagagtgctaataatataattttggtacagttgaaaagaaaggcggtactatattttgctttgccaaaattgtcatgagcggcccgcttctattcaccttttcactaaggttaatggccaaagccgcgaaatagatttatgtcaacactgttatcaagaattaaaaaatcaacaaggaaatcaaggaaaaatgaataataatgaattttttggcgactttgatgatttattcaacgcattaaacggaaataacaacaatgccgcaaacaataataatgaaatgagaaataacgaccctagaatgcaaatggggggaggcgctggtaatggtggtcaaaacggcagaagcctacttgaccaatacggaacagacttaactgcccttgctaaaaaaggcaaaattgacccagtaatcggtcgtgataaagagattgctcgggttatcgaaattttaaatagaagaactaagaacaaccctgttttaatcggtgaagcaggtgttggtaagactgccgttgtcgaaggcttagctcaagaaatcgtagatggatcagtaccagcaaaattgcagaacaaacgaattatttcattaaatgttgtttcacttgttcaaggtaccggtattcgtggtcaatttgaacaaagaatggaacaattaattaaagaattacaacaaaacgacgatatcattctttttattgatgaaattcacgaaatcgttggtgccggtaatgctgaaggtggcatggatgccggtaacattattaagccagctttggctcgtggcgaattgcaattagttggtgctactaccatcaaagaataccgcgatattgaaaaagactctgctttagctagacgttttcaaccagttgaagttaaagaaccttcaattgacgaaacaattcgcatcttaaaaggtattcaaaaacgctacgaagactatcaccatgttcactacactgatgaagccattgaagctgccgcaaaactttcagcacgttatattcaagatagatttttaccagacaaggctattgaccttcttgatgaagcaggttctagaatgaacttaaccattccttatattgataaggataaaatgcaagaaagaattaatgccgcagagcaattgaaggaagaagccttaaaaaacgaagattacgaaaaagcagcctactaccgtgatcaaattgaaaaatatgaaaaggttaaagatcaaaaggtagatcctgacaagtcccctgttattactgataagatcatggacaagatcgtagaagaaaaaacagggattcctgttggtgatattcaaaagcaagaagaaaaccaactgcaaaatctagctgctgatttaaaggctcacgttatcggccaagacaaggctgttgaaaaagtagctcgtgccattcgtcgtaaccgaatcggtttcaacaagtcaggccgtccaattggttcattcctcttcgttggtccaactggtgtcggtaaaactgagttagctaagcaactggctaagcaaatgtttggctcagaagatgcaatgattcgtttcgatatgtctgaatacatggaacaatactcagtttccaaattaattggttctgctccaggttacgtaggctacgaagaagctggtcaattaactgaacaagttagacacaacccatatagtttgatcttgcttgatgaaattgaaaaagctcacccagatgttttgaacctcttcttgcaaattcttgacgatggtcgtttaactgactcacaaggtagaacagtttcattcaaggataccatcattattatgacttctaatgcaggacaaggcattaagaacgctagcgttggctttacagcagaaaacgaagatgaagctaatgaatctgctagaaataatatgagccaattctttaagccagaattcttgaaccgtcttgatgatgtaatcgaatttaatgaattgactaagccagacttgcttaagattgttgacttaatgttgcaaaataccaacaatatggttaaggatcaaggcctacacattgatgtaactgctgctgcaaaagataaattagttgaagatggctttaatcctgccttaggtgctcgtcctcttcgtcgtaccatccaagaagagattgaggataatgtggctgatttcaaacttgatcatgcacaggctaagaatttaaaagccgatgttgttgatggtaaaattgtaatcagtgatgaagcaaataatgaataggatttaataaaagacaaagtccaagttataccaaaagatttcgaagcaatattagaaatcttttttcttaaaaataaaaatatgctactcaatttgaggtatactaaattagaagaagtaaagctaacagaaacaggtgaattccatgcatttaattgatgtaaccaataattactctgatttggttcacagtcagctcaacactaccgatgcaaactatgttaaagtttattctcttggtaatacttcagttatttatactgaaagtaaggattctatcggtattgtacttgaaaaccatgaccgtcgtgttcgcgaagatgagattgaattcgtaatcaagcgtttaattaaagattatgattcttcatacactttgactgtagacaagagtcgtcatgtaatcgaaattcacgttgacaagtaatccaaatattgttgtatcaaaaaaggaggattgattcattcaattctcctttttctttttgctttaaagtttttctgttaattcaacatctggatatttgtcatggaagaaacgttccgcaaattcattttcaaataagaataatggattaccataacggtccttaactaataagttacgagtattagacatgcgtgggtcaagctgttccggatcaatccagcgcgcaacacgatgaccaatactgttcatttcaacttcagaattatattcattcttcattctgaattggaacacttcaaactgcaattgaccaacagcaccaagaatatactcatccgtttgataattgcggtaaagctgaattgcaccttcttggactagctggttcatacccttatggaatgatttttgcttcatcacgttcttagcagttactcgcataaataattcaggtgtaaattctggtaatggtggataaacaatcttgcgcttaccagcataaatactgtcaccaatttgaaaattaccagtatcgtataagccaactatatcgccagctaccgcatcagaaacttgtactcgctcgcttgacatgaattcagtcgcattatttaaacgaattggcttatcagttctagctaaagttacatccaagcctttcttgaattcaccagaaccgactctaacaaaggcgattcggtcacggtgatgaggattcatattagcctgaatcttgaagacaaagcctgaaaattctggatcttctggacttagctcctcatccccattaactgtgtgactctctggtgctggagccaaatcaacaaagctgttcaagaatgtctcaaccccaaaattggtcaaagctgagccaaagaagacaggagtttgatcacccatagcaatcttctcgcggtcaaacttgttcccagcttctttaatcaaatcaatttcatccagagtatcctggaattgaggatcttgactaagtggctcactatcaggcaacttaccatcttgatctaatggtaaaaagcgatcttgatcatttttgcggtaaagctcaacacgattattagcgatgtcatatagaccctttaaagtttgacctgaaccaattggccagtccattgctacaccctcgataccaagcaaatcttccaattccgcaattaaatctaatggtggacgtccatcacgatcaagcttgttcataaacgtgaaaattggaataccacgttgcttaacaaccttaaacaacttctttgtctgtggctcgatacctttagcagagtcaattaccatgacagctgagtcaacggccattaatgtacggtaagtatcttctgagaagtcctggtgtcctggcgtatccaaaatattgatacgcttgcctcgatattcaaactgcataaccgaactagtaacagaaatcccacgcttcttttcgatttccatccagtcactagtagcaaaattgccagttttacgtgccttaaccgtacctgctttacgaattaccccaccaaacaaaagcatttgttcagtaatcgttgtcttacctgcatcggggtgagaaataattgcaaatgttcttctcttttttactttatctgctaactctttgtccattagtcctcgctatcttcttccttttttgattcatcaatcgttaataataccgtcaacaagcgtgaccccttcatccttctagtggtcaaagtcatcccatcaccaatatcaactgttaacttttctcccttagctggaatcacttttaaagtattgatcacatagcctgctatcgtatcaacatcttccatttgaagattagtaccaaattgctcattaaaatcatctaatggcatcttaccgtaaataatgtacttatttggagctatttgattaaaaagaatctcagtgtgatcaacctcatcatcaatatcgcccacaatctcttcaaccaaatcttcaattgtagctaatccagttacaccgccatattcatctgtcaaaattgctaattgtcgttgcgtttgctgcatttccatcaacaaatcgcccagctcggcagtttctggtgcaaacagcggctcagtcatgacatctttatagtcaagattatcaaaacccttttgtttagcctttcgtaaaaccgttctgatatgaataatccctacaatcttatccttatcacgttgataaacgggaattctagaatatggctcacgaaggatttcatctagattgtcttgaaaactgacttctcgatcaaccatgaaagcatctgttctaggtaccattacttcacgggctgtcttaccctgaaagtccaaaataccttctagcattgaaaattctgtatcatcaattttatgactttcatgtaaagtaacaatttctttttctaaatgatctttagtccccacttttttatcgccggataatctattttttaagcgaccaaacagagttcccgctccaggatcactattcattttcgtactctctttcttaaaaaagttatctaaatatagctattatagcatagagccaataacaattatgttaaaatagcacataagactaggaggttcgtcatgaaaaaaagtcatgtcttactcgtttttacatttcttttgctaattccctatatctgtagcttagctattattggaatcggctataatgcattagttttacattcagctgaactttatcgcacattaatcggctcattagttggcgcaatcattatgtttgctgtcaaggctactattcaacggcctgttgatttattagctgttcaaaccaacgatggcttactgaagcagcttttacgtttcttcagtatcagacgacgctactggcttttagcagctaatattatcttagactttgttctttgctttgctgctacctacataatacgtgctcttttaacacttgatcaaatcgtaggcagctccatcggctttgttttgttaatcatgtttgtttcaacttgtcttggcgcttatgttgaatacgataacctgtcaatcgaccctgagcagcattaattacttgctggccttcaagtacattacttgagccagtttttttgtatccatgtcaagatcccaagtaatatatggcgtgtcactgtcacccaaattttcatgtacttcaattccgctagcaactacttttttggcaaaatttggcacggtactagtcaacggtaagttgaaaaagactaaagtttgattctcttctacttcctccgctacctctgcagctggtaattcaaacttcattaaacccgttggcacttcatcttttgctacatctgctaaaacgccataccaatacataaagctgtcctcacctgataccactaggacagaacgcttattttctaaattatgatcagctaaaaatttttgaaaagtttcatcattttccatttgctgattagcttccataaagctcttttgagcattcatcaaaccagctggaaatggacaaccaataaataatcttgattcaatatttttcttcattttttctcctaatattctactaattcgtctaaatcaattatttcaccgtttaaaaaggcatcaatctcacctgatgaaaaaccgtgactaaacaaatatttttttattttaaaattgcgttcaatttctggaagatttctaaaacgcttgtaagccttaattccttgtttcttcaaagcttctgtttgtgcattctcatcttctttaagatccattgcatcaataataacgttactaatcccgctatcaaagccatgcgttaataatttagtacgcatcttacgctctaattcacgctgtgaaatcttgccaacttgatggctcatcgacttaatcacgcgttggcccacttctagccaatcttcttcatcaatttcatctaacttatcctgactaatttcaggatcaacgcctttttgcgtcaactttcgtaataaacttttagggccatcagagccaacacgcaaatcatttttgataaacagcttggcatattgacgatcatcaagatagcctaattcattcaattgactaacagcactattggctgcttcatcagagatttcgtgtttttttaaatattgcagcacctcaaagatggtccgaggctcgtaactcaaaaaatgagccgctaaatcactagccttagcatcagcatcaaattgcctaatcttttcaacctgctcatcatttaattctttacctttaagcagcacaaattctgccaacgttttctctccggcagaaaaagcatattttccatcaataaaaatattatagcgacctggccgtttttgtgcacttactttggttatgatcaacttgtttcacctcgcatatttttctacatccatgctagcaaattttgctaaagcttgctaagaactttttccaggtagtacaattaattgaacacaatttagtttttagtagaaagaattaacgatgaacagaaaatttacccataataaaccaaaacatgaaaaagacgtcatcatcactattaagcgtttaggaattaatggtgaaggaattggttactacaagaaaaagattatcttcattcctggtgccttgccagacgaagtagtagttgccaagattgttaaatcatatccacactacatccaaggcgaactggttagaattaaagaaaaaagtccagatcgcgtagacttccctgaaggtgttgatcccgagattggtggcttagaattagtgcacttgtcttacgacaaacaacttgaattcaagaagaacaatatgcttgaatcattacgcaagtaccatcctcgtaattacaataagtataaagttaaaaatactatcgctgctcctgacccatggcattatcgcaacaaggctcaatatcaaattgaaaaagatcatggtcaacttaagcttggactttttgctccaaattcccaccgcttgattgacttaccaaagatgccaactcaaagtgaagacacacaaaaaacggaacgtaaaatcaaggttttaattgaaaaattgcatgttcctgttgccaactatcgtcgtcatttacctggcattaagaccgtagttgtccgtcaatcagaagcaactaaggaaatccaggtaaccttgattacgatcggccacaagattaagaacttaattcctcttgctaaagaaattatgaaacttgatcatgtagtttctgtctatcagaatgaaaccgaatggcagaatccacaagtttggggaaataaaaccgaaaagcttttgggcaagaatcaaatcaccgaagaaatcttaggtaaaaaattcgccttatcaccacgtgccttcttccaattgaacccagttcaaaccatcaatctttactcagaagcattgaaatacttagacctaacccccgatcaaaccttgattgatgcctatagtggtgttggtaccttaggtattttggcagctgaccgcgttaagcaagttgttggaatcgaaaccattccagaggcagtcaaagacgcacaacataatgtcgagcttaaccacatcaaaaacgctgattatattcaaggcagtgttgaaaaggttttgccagaattacaaaatagtggtgttgcaatcaatgctttaatcgtagacccaccaagaacgggcttagctaaaagcttgatcaaaaccctcttgcgggttaaacctgaaacttttgtctacatctcatgtaatccctcaaccttagctcaagacttagttttacttagcgaggcatatgatgttcgggtcatccaaaatgtagacatgttaccacaaaccccacgctgtgaggcaattgctaagttagtgctcagaaaagatagataaatccaacaacctagtctggggctaggttgtttttgtatataaaaaagcggctactggacaatcctgtcccttagtagccgcaatttcaagtggatgaggtagctcatcaattgatagtcacgatttttagttgtttggtatgtatttaaacaatggcattatcgcaaccaatattaacattcacttgttcgggtctttacataaaatgtaacttttaataaattggagtttttgcgaacagccaatgataattaatcaaataatttttaattaagctatttatggctgacacctctacgtatagagaatctttcaagtttccaataataatacaattctggagataaaaacttacttatatttttttatagttgttaacttttatttctacctcttccacactattcattatatctagttgtgaaaccgtttacaagaactaacccacatatttttgcaaaaatctttctacttgttgtcgatattgctttggatacattggataagacaaagcatgccctgcaagtggcgcaagccaaatttgctttggagcagctgttgccgcataattttgccagaccatcttagttggcacaaagtgatccttgccgccatgaataaataaaaatggtcgcgtatttttatttaactgagcaaccgcagaagcatcttttaaataaaagccatttttcactctattaattccactaaccaaatcaactattggaaaccgtggaaaagccttcatatgaaataaattttgagcttgatagttaatttcacctttcacggttgaataaccacaatcttcaataaaagctttcacttgtggtggcaaaagcataccgcttaccatcattgccgttgcaccacccatgctttgacccataattacaatttgggcatttgtaccagtttgatcaattacttgatagatccaacgcaaaatatcatctttttcagcccagccatagccgatatacttaccttcgctgcgcccttgggcacgtgcgtctggaacgagaacattataaccaaaatcataaaacattttggcaaaaccagccatactatctccatcactcataaagccatgtaataaaattgcggttttttggcatgttgatcaaggtactgggcgaacaaagttatgccgctatcagttttttaagtccatgttttcttagaaaaatctctaaaccaaaccttatcacgataaagtggatccttgcctgataattctttggagtcagcttttttattaaacggtgtcatcgccatcttgaaaaagtactcgcttgccgcaaacaagccagctccagcaattaatgcggaagacaataatagtttctttttcatcttttaacacttccaaattcaattatttcacttttcattttataattaaattgctgaaaatttacaatccttatgacttaattatactgaaaaatgcgcttaacagacttacttcaattaatcgatgacctgaacctgaatactaaattttatctaaagcatgatgacaaactacttaagtggggaaaactcactattgccgaaggaaaatgtctgctgctacccgggcaaacagcaatgaccaaacaaaaattgattaaattagttggccgcatgcatggtcgcggcatccccttgttaacggtcattgaccaaaaagaatattccattttcggcctacagattcgcgaagatactggacaagcaattttaatgtaaaaaaaaaatttttcttattcttttacgcggtattgacgaatatgatccttagtaccagcaaaataccaagtacctacttcatcgtcgctagttaattctaagccatcctcaggatctaacaaagccgtattgaagacgtcttcatattgcttaactgtcagcttcttccgccgatcaagcattgcttgatcagctgtaggatcaacttgtttttcatatccttcaaccaacttgccactataaaactcagccattgcacctgaaccatatgaaaacaggccaattaatgagccagcaggtaattcaccattctctagcaaactaagtaaactcatataaagtgaagcggtgtagatattacctactcggcttgataattgtttagcagccgcaaaactacgctccaacttgatcattgttgcttgatcttgcccctcaatcgcaatattattagcttttaagcccatcttagtaaaaggtaaatgataagtaattgcatcaaaatcactagtctttaatcctttttgcttcttataatcagtaaaggtcttcttgaagaaatccaagtaaacttgagtcgaatacttgccgtcaactaaagcggtgcgagaataatttggtctccagaagtcgttaatatcttcgctgtaagctgaatgaccattatttagggctaaaatgcttgggtcagctttgatgagcattgccacgctaccggctccttgtgttacctcaccagcagtattaacaccatagcgagcaatatcactaccgatgacaattgcggtttgttcaggatgtacccgaacaaaatcacgtgccatcattaaggatgccgttaaaccaaagcaagcttcctttacttcaaaagttcttacttctggcttcaactttaaggctgtttttacaaataaagaagctgactttgattgatcaatactactttcagtcccaaaaattaatagaccaactttgttcttatcaatcttgtcaataaactttaaagtcgcattaattcccattgaaactgcatcttgcgtaatatccgcaacactcatctctctttgaccaatgccaactaaaaacttatttggatcttgctttcttgcgttcgccaaatcgaccatatcaacgtacttgtctggcgtaaaaagtccaatttgatcaatacctacttgcattatttttttatttttgctaaaagctccttagcatgactttcagaataatttttttcactaatcatcgcagctagtagctgcttgcgctcatgttcgtcatcggttaattcagtgactacgtttctagcctgcaatttcatatgccctgcttgaatgccgacagtagaaattgccagtaaagcggctaaattgtttgctagagcaacactaacaatgatctcggctaatgttttactcgtgattttttgccccaaaatagcaaagctttgccggacatcatgccgagctttaattgaaccgccaactactccaatcgccattggcaaagtcaattcgccaactaaataactaccctgcatcgtccactttgataaactgcgatattggccatcatgattggctaaaactgcagtggctgcttcaattgcccgataatcattgcctgtcgcaatcaatacggcgtcggcaccattcatgattcccttattgttagttaccgcacgataaggatcgtcaattccaatttttcctaatagagcaacacgttgtgcaacttgcatcccaccaatcgtttgtggatcaatcttcactttagccgtggccaattggctaggataatttgataaaatcgcaaataatttttcatcaacaccagcataattttctaatttagccgctaaaaattccaaaatcgagttggttttattcgcgcccatcgcctcagctggatcaaccaatacttttaagtaaagcaaatcctctttctgcacagcagttatttttctagtaccaccactatgacggactaagctggaaaacttttgattagctaattcgactaagtgcggaaattctttttctaattcaattaatgaaaaagaattgttgaccttcaaaacgatttgaccataaatcccttgtcggtcgctgctagctgtcacaccaccatttctagcaaagatactagctccatgattggcggcagcaactactgaaggttcttcaacagccattggcacccagtatttttgtccattgactattaagttttgtactacacctaaaggcaaacgcagctgccctacaacattttcactcaattcatctagacgtctcaaaaccgtatcatcgatttgccctaatgcaataccttcgtcctgtaataacttacgtctagcttcaggctctaattgataaaatttcattctgcattctcgatttcataagcaatcgcctgaccgccaccgatacacaaagtaaccagggcacgtctgccttttctcttctttaatccactaattgcactagcaactaagcgtgtacccgttgcacctaaaggatgacctaacgcgattgcgccacccataatattcaatttatcagttggaatttgtaagtcgcgagctaccgctacactttgggctgcaaaggcttcatttaattcgataatatcatagtcatcaaaattatgtcccgtcttcttaagcagttttttaaccgcataatatggagtataacccatcagtgcaggatcaaagccagcttccgcaaattcacctaacttggcaattggcgttaagcctaaccctttcattttctccttagttgccagaactaacatacttgcaccatcagtcaaaggagacgagtttccggcagtcacttcaccatccgccttaaaaacaggctttaagttactcaatgcctcaagcgttgtatccggacgaattggttcatcatgatctaaactttgaccatcaatctccacatccaggatctcattatcaaaaaatccggatttaactgctgcagctgcctttttatgcgactgcaatgcaaattcatccatatcctgacgactaacatgatatttttctgctacgttttcggcagtaattcccatatgcttgccagaaaaagcatccatcaaaccatcgttaagcatagtacttactaggtgatctgctggatcatttttgttttcttttttaacaaaataaggcgcattagtcatgctctcactaccgccgacagctactagatccaaatcgcctagttccatctgtccttgagctagacgtaaagctttcagacttgagccgcagacttcattaattgtaacggctgcagaagcttcactcatccctgaatgtaaggcaacttggcgagccatattctcacctaagccggtatccaaaacattccccataaacagtgcttgaacatcagctggcttaatattgcccgccttcattgttcctttcaaggccattacacccaaatcaattgcagaagcatccttaaaaaatcctcggtacttgccaaaaggtgttcttttagctgcaacaatataaatgtccttcatatattttctctctctccataatgtgtattttttaacaaatatgataatagcaaaaaaatattaagaaaaacataaaaagactacgccgcagcgtagtctccctaataattaagcttattttttattttgcttaccttcggcttcaaactttttgctcaattgcatgatatatgcccgcaattgttccttaatttctgggtgcttcaaaccatattcaattgaagtttcaaggtagccttctttgttaccaacatcatgacgttcgcctttaaagacatgagcaaagacacgttgagtcttgttcattgtatcaatcgcatcagtcaattgaatttcaccgccacgacctggtttttggttagccaaaatatcaaaaatttcaggtgttaataagtaacgaccaataatggcataatcactaggtgctttatcaatatcaggcttttcaacgaatgacttaacattgatcagtcctggcatgatctcattttccggttcgatgacaccatacttagaaacttcttcatgtggcacaggcataactgcaattgtagaagcatgcgtcttgttatagcgatcgatcaattgcttggtcaatggcaccttatcttccattaagtcgtcgcccaacataactacaaatggttcatccccaacaaaactgcgagcacggaagatggcgtctcctaaacctgctggatgcggttgacgagtgtaatacaagttaacgcctaaatcagtaattccttcggttaggcgaagcaattcttttttacccttttcttccaaatcttgttctagttctggattagaatcaaagtgatcttcaattgggcgtttgttcttgccaattacaattaaaatatcttcgattcctgactttttagcctcttcaacgataaactgaattgttggtttatcaacgataggtaacatttccttaggtaaagccttagttgcaggtaaaaatctagtacccaaaccagctgatgggataacggcttttcttactttcataaaagcacactttctatttcaattttataagttcatcataacaaaatatgcatttttcagctacttagtttttcgtcttttcttttgaatataactggcaatacgaccagcagaatattcaacttgtccaacacggtttcgcacaatagcagcgttaacaccaacgccaaataaaaataatactgctgcaatattcaaccagagcataaagatgataaacgtaccaacaatgccataattctcccaagtaatcgggaaatggtgtaaatagaaactaaaaagaaatgatagggctaaccagcctacaacagttacaaaaactcctggccaaattactctctttttgagttttatattaggcaaaacatagttcaaataccataatgctagcatcataaccaatattaatactggatagcgataactaaagatcttgctaatttcattaagtggtagctgaaaaatcggtcctaaaaagttgagtacttgttgcccaaaaaccaaggccaatgtagcaattgtaaatactagaatcatcaatcctgtaaaaacaaaagtaatagttctagtccaaagaaaattaagcattgataattttaattcaacttgatgaaccccataaagtttattttctccaagacgaattgcattaaccatatttgataatgaccaaactgcaaacacaataccaaaagaaatatagcctgttgatgtagttttcaataaagaatttataattggcataatgaatttagacacttggtctggaaaaaccaagttcaaatattcagcaataggcgcagtatcaatgtgaaacaacggtaacacgttaccaatgataataataatcggaaaaatagaaaacaaaatgtagtaggcaataataattgaactagcaaatatctctccttgagataaggtggttcgtaatgtagaaataaattgcccaatttttaaaccaaaatggtttttaccatttttcatccattatcctaatcatccatctcatcaaagtgagggatgtacttttctaagccatcgtaaggatgctgcagggtcaagatcttaggaccatcttttgtaattgcaaaggtgtgttcaaattgagcagcattagaaccatctggagttgcgtagtaaacccaatcatcgttaggatcatcaacagtacgttggtcgatgtgccagtcgccaccagcttctaccataggttcacaagtaatagtcatgccttcacgcaagcgaagaccatgacctgccttgccccagtgaggaacttctggatcttcatgaattgatggttgaataccgtggccaattaattcacgtacatcaccgtaatgattttcatcttcaacataatgttggatagcagcaccgatatcaccaattctgttacctaaaacagcttggtcaattccgagatacattgcttttttggttacttcaattaatttcttatcagcttcggaaatttcgccaactggataagtagtacatgaatctgattcataaccgttcaagttgcaagttacatcaaccttaacgatatcgccttcctttaagatgcgatcttttcttggagtttggtgggcaatttcatcgttaaccgaaatacaagtaccatacttataaccctcaaaaccttgttctgaaaggcggccgccacgacttgatacgaagtcttgacaaaactcttcaattttccaggtagaaatgcctggcttaatcacatcacgtaagccttcaaacatagttgcaagaagatgtcctgaagcttgcatgcctttaagttcacgaattgatttaattgtaatcaaaataatttctcctttataaatttttatttagtttcagatatttctattataccgttttccaaaatacttttaaaaggtcgggtttttgtagaatcaaaacaaaactctagaaatacctgaaatatttttaaagtttgctaaaactaaacgtttttgcaatagtttcatgtataataaggtgtcgtataatgcagtgaaaggtatgaaaaatcatgaaagcaagaattgtttatgccagcatgactggtaacgatgaagacatggctgatattttagaagaagatcttcaagattatggctttgacgttgaaacaagtgatgtcggcttcactgatgccaatgactacttagatagtgatctttgcatttttatcacctacacctatggtgaaggcgtaatgactgatgaattggcagacttttatggggagttaaaagacttagatctaacaggcaaacattttgctgtgatgggttctggcgataagacctacggtgaacacttttgtgaaaatgtttttgactatgaaaaagcattcaaggattgcggcgcaactgaaattactaaacccgtaacaattgaaaatgcgccagatgatgatgcagtcgctgcaatcgatcaagctgcaaaggaaatggccgataagttaaatggctaataacaaaaaagacgtcacagctgttgatcaggcacaaatacgccgtctaggtcaaaaattaatcaagcgacaccgtaatctttgggtttacatggttttcggctttgtcgctgcattaatcaataccttagtcttcatggtcttacactcatggtggcataatgtgatggtaatttctaacaccatcgccttcatcgtctccaacctggcatctttctggtttaaccaaaaggctgtttttatcaataatgtcgatcatgaacacagcacgtggcataaactaatcgtctttttcacttatcgcgtcatcagtttaatccctgatacattaattatgttagtcggcttatcctggctgcatttaaacgcattactagtcaaaattatcgaccaaattttagtcggtgtattcaattacttaactactagatcagtctttcaaaagcaagaacatactatgattgaacgtgcaaaaatgcgcattcaagaacaaaaaaataaaagagacagcaaaaattaaaaccaatgtcattaagttaagacattgacaaattgaatctaatctctgtagaaccgaatcattatgatttggttctttttttgcataaaataaaggcgaaaagaacctaccttttcgccctctgattaaattattaaaccttcaaaattattgccagaaagctggtgttaattatgaaagcccttcacagaaatattttagatcgtcttgatcaaattatcaatgatactggaaagcatattcatgattttatcgatgatcctcatgccttcactaggaagcggtttttagatgcagctacagtcattaaaactactattaatatgcaaggaaaagatttgaccagtgagttgtttagagcttttggccaaaaagctattaaaaataacgataaagtagtcagtacttccgcttatgtccaacgcaaaggtcagctttcacccgcatgttttaagcatattctaactgtatttaatcagaatttatttaatatccagttatttgatcataaatatcgtatatttgccattgatgggtctgattttaatcaaatctggaatcctaaatcagagaatatcgttggaaatctcaatcataaaggaaagccatattgccaaattcatgttaatgcactctatgacctgttaaataatacttatcaagactgcatctttcagcctaagtcaaagatggatgaacgtaaagccgccgttcaaatgcttaaaaagctaaattgcggaccatatatagttactatggatcgaggttataccggctgtaacatgattgaaaattgtaatcgcctgcctaactgttattatgtcatacgtactaaaacgggatatggcgcatttaaggaagtagctgagttgcctaatcaagagtgtgataaggatatagcttgctgggtgactacctctaattattattatgaaacccataaggctacagaaaacgttcatttggttaaccatcattaccgtcaatatataaaatatcggtctaaaaataccaaagatggcagctgggactttggagagttatgtacaataaaatttcgtgcctgtaaatttagaattaatgatcctaaatcaggcaaagaagaatgggaagttgttctaactaatctaaatagagccgattatcccttaaaaaggatcaaagaaatctaccatttgcgctggggcattgaaacttcattcaaaaagttgaaatatgctttaggtagcgtacagtttcattccaagcaggatagatttattgaaatggagatctatgcccacatgattatgtttaacgcagtcagtcaaattgatgctcaagcatatgtaccacaaaaaaactgcaagtatcaatatgcgatcaatttcaaacagtcatgttttgtcatccaggctatgtatataatttcttcttcaactgaaatctttaaaaagattcttattcaaattagtcattacacaattccgatcagaccaggacgaaaagacaaaagaaatctcaaacccaaatcagctgtatattatttatatcgtgtagcctaatttctaaacaagatttgggtttatttggcatgaaaaaagatcattcaaatgcgataaatcgcaaatgaatgatcttaaaagtccaagtcgataatttgtcaatgtcttaacttaatgacattgaaattaaaactgtctctttatttttttactcaaaatcttttggtttactttcactatcttgattaaagtaataataaatatcatccataattcgatcagctgcatgtccatctccatatggatttttggcattcgccatccgatcatattcgtttttgttttctaacaaagctagcatttcttcacgcaccttgtcgacttcagttccaactaacttcaaggtaccggcctttacgccttcaggacgttccgtcgtatcacgtaaaaccaaaactggtttacctaaactaggagcttcttcttgtacgccacctgaatcagtcatgataaagtatgaacgtttagctaagttatggaaatctaccacatcaagcggctcaatcaaatgaatccttggatcaccaccaagcacttcattagccactttttgtactcgtggagataagtgaaccggataaataatttctacatcaggatgcgaatcaattacttgccgcattactttaaatactcggcgcattggctcaccttgattttctcgacggtgcatagtaaccaaaatcaccttattaccaggagtaattgcgtctattacctcatgatgataatcttgttgtacagtctgtgctaaagcatcgattgccgtatttccagtaacgaaaataaaatcagaatggtgattttccttcagtaaattagccttactcaattcggtcggtgcaaaatataaatcggctaaatcatccgtcatctgccgattcatttcttcaggatatggtgaatacttattccaagttctcagacctgcctccacatgtcccaatgtagtttgctgataaaaagtagctaaagaagccgcaaaactagtcgtcgtatcgccgtgaaccaagacaatatctggtttctcttctttgatcaccttagataaatcaatcatcactttagaagtaatttcttctagagtttgattttggtgcataatattaaagtcataatctggtttaattttaaaaatatctagcacttggtccaacatttcgcggtgttgtgcgctaacgaccgttacttcttcaaaacgatcatctttttttagtttcaaaacaagtggtgccatcttgattgcctctggacgcgttccaaaaacagtcattaccttaattttcctcattaaaaaattcctccgcttaactattttactatacctgattttagactatcttgcacccgctttctgtgttttaatggaagtattaaattgaaagttggtcgatgcatgaattcatcattactattattaattacaactggtttaattattttgattggaactttttgccttgtttttggtatggacaaaaacagacccgctaaaactagaaaatatttactttatactgcactaatctgtgttttcctagtttggggcttaattactgcaattatgcttcaacccttaggataataaagataccttttggataaccaaagcatgtaaaaagcctgcaagaccaatacttgcaggcttatttctatgaccccggtgagattcgaactcacctctacggtttaggagaccattgttctatccagatgaactacggggtcaaacctaagattaactttaccaaaaaaagtggtaatagttaacctttttttagaattgtggattaaaaaatgttttcggatggttggtatcagcaatcttatcagctgctttaacaaaaggcatccaaattagcaaagtaacaatcatatttaaaatgcttaaaacaattgcacgccaatcataattgcaagccagaaatgggccaataactggtggcatgatgctaggtactgccacttgaactggattaaccaatcccataatgctaacccaataagaaaaggcaacattaactagtggcgctaatacaaatggaattagatacactggatttagcactacaggcaggcccaagagaattggttcgccaatgttaaaaattcctggagctagtgagattttggcaattgtgcgataatcactgcgtttagaaaacattaaaatcgccacaattagcattaaggttccaccagcaccgccaaaccaggcaaagacatcaaatgagccacgtacccatacatatggtggaatatttccattactaatcgctgtgatgttatcattttgagcagtcatccaaattgaatccaaaattggtgatagaacccctataccattaattccaaaaaaccaaaataactgcactaataaagtaatgacaattaccgtaccaaagccttgtccccactttactaatggagtttgaattgtggtaagcaaccaatttccaaaatatttaccggtaagaatttggaacaaataattaattccgcctacaccaaatattgcaatcattgcaggtaataaagaatcaaaagcagcttgttcagcatggggcaagttcgatgtcacatgcaacataatccttgctttatagcaagcataataaataaaaaagcctaatgagccaaacaaaatagcagtaaagaggccagtagttgagaactgactaatgtcaaatgcattatgcagtgtaacattatcaccatgaaatttaatcttagctatattggcaatgcttagtgcaaaagaagataatgccacaattgaagcagcaagtctatttccttcaaaagcttttgctagttgatagcctaaagccaatgctaagaaaaaggcaaataatgaaaatgttcctcgccaaactaaattactgattgctaccaatggctgtatcgcaaaagcaaaggcataccagcctaaatgatcatgagctgcttcaattaagctcttaattaaaactgctaatgatcctgccattgtaattggcattaatgagacaaatgcatcccgtaaagcaactagccatcttatctgaccccatctactagctagcggcaaaacatagtcctctagccatctaactaaacgaatcatttctttcctttcaagtaatgtggatgatatcccttgttcttattacgtttcttgcgttttttagttttatttttcttagtcgaagtcttaatgggctgctctttagcctgcttcttttccttcttgagtttaggcttttcagttgttaaatgatagcctgcaaagtagacacgctctatttgtaattgatctgccaataatttcttcaaatcacgaaaatcgtgatcatcgcctaaggtaaccacataaccttcagcgttcattcgacctgttcttcctgcccggtgcatgtaagtattagtctcgctcggaatatcaaaattaatcacataggtaaggcctggaatgtccaacccacgcgcagccaaatccgttgctagcagcaatttcgtcttaccagtagctaggtcatttaaggctttttcacggcgttctttaccaaattcattagctaataattcgaacttagtcttagtatgcccaaaaataccagcaaagcgcatcatcgttttatttgaatcaaagaacaaaattcccttaaagtgatccaacttagtcattcgctgcaaaaattcaatcttgtgttgattgtctacttgcaaaaaataatgtttagtcgctgaagcttgttcatttctgacatctactaacaagaaatgacggttaaaaacttgctccgcatcccgtgtaatctcagaatctgttgctccaaataataagatttgactgtctggacccagattttgccctaatgctgataacaattccattttagtaaattctaaaatatcatcggcttcatcaataatcaaagtcttgatctggtttactttaattcgaccacttgagaagaagtcaaaaaaacggcctggtgtagctacgaccacttcaggatgctttttcttcagattgtcttcttgtctctttctattgccagcaccaaccaagctgacgccttttaatcctaaagcgtggatgtaaggattaattgcatgacgaatttgtacagctaattcagtcgttggcgcaataattaccacgctgttagcattacctggctgtgctttttccaaactaggaagtgcataagccaatgtcttacccgtacctgtcttagccaatccaaccaggctcgcaccattgcgaatggcatcatagctttctttttgaattaaagttggctggtccttgtgttctctaattaaaacttgtttgattttttcttgatacattattactgtgttaattgcccatacttttgcttatattgaccaacggtcccgttatacgcgtacatcgttacctggctttctaagcctgaaacattccttacgcgtccgttagtagtgtagcaccaaaatgaatactttaatttattcggtgccttactatctgatgacataaataacgtttgcggattaaagtaatgttgatatttatgatcaactttcaccatgactcttttgccagctgcttgcaataaagccgcaaactgccccattgaccgcaaatatctcgctgaacgagtagtcactgccggtacaattagaattggcagcgagcccgtattttgtcctacttgcttaaaaaaagtagcggtaatgctgcatcggagtcgattcattgctataggaaatctcactaccaaatgccaagttcgttcctaaaatttggtcacgataagacagatagttttcatcaaaatatgatctgccttgggttgctttcaaatatataaaggaaacgccattagattgcaatttatgtaaatcaacatagtcaatatcttgatttaactcaatcccaatcgcacttgaattagcatctggcggtaaagttgtttgccgcttaaaattgaaaaagccaatcaaaagaaatgcaatcgccagaattaataaagtcaaaatcgctggcaaagtatacctatgctgaaatcttttcatcggctaaattcctcccttaattattttaaccgaaaagcctatcaatacaaacatttccagtcgatggtaagtgtcaatgtttttgcggtagcctttaaaccattagtctaaccttaatttcttaaatatttatatgacttaaatttctgcttagcttgcttaaataactattgccagctacctgtgcggttaatgcgccatgctggatgcctaaatgaacttcatgacgcttctttaagctgtcacgggccgctgcttttaattcctgttcagtcaatacagttatttctgaatcttcaaactcgctgctaagccaaaattccagctctcgattcttgatgcagcttaagatcctaagcatgccttctgctccagattttgaccatttcttgccttgccccttaacacggtaggtatacttgcggtggttgctctcgcagcagccaatggctttagtcacagtcagttttcgtttcttaaacggcttaatatcgtcccaatgacgatcaatataattccttaggcgccccagataatcatgattgagctcggtattcaattcatcaattagtcggctttctgcagtggttaggatagttttaactttgtcatagctgtatttgtattccaaagcagaaatcagcttgccttgcaggtcaggcgcaaaatatagcctttctttgattttcttatttaggtgaaagacatccaagaaatgctcatgacgcttgcatagccctacaatgtcatcgaagtctgttttggcatatccagcaccgccatcggcgttgctaagaattacagtatcagaaagatcataagtattggccaggtactccttggcttcgttcagcgcatcaagtcggcttaaagaaacaaattccttggcattgattcgctttctgcgtttcttgcttatattgacaatgccttcacagacctgatagcgatgaaattccaaccggcttttagtgcctttgatcaccacgccatcgccttcaagatacaaaactgggacctttttcttagtgcctgcggcatcatatcttgaatctgcttcttggcccgctttaatatttttcccggccatttttaccaaattgcccacctgcatatggctaatattaaagccagacaggcaattgactgctagagcagtattgcgataagtggcaacgctgcttacttctaagatgtttttgactgctaaaatactgtagcgcttgtatttgtcaaagcccattaattcatccaagggataccttgcttgtttgcctgggcagacatatcttcttctgacatacctaacttcgccaaaagccatattgattgagcgctcattcttcttatcaatctgatagccctgtgctttaaccttggtaatcatttcatcatcaactttagctaaagccaaggccatgatttccttaatcaggtttaagaagaaacagattatttttctttcacgcttaatataattatcttcaggctttataatatttgcgatttcagttacaattgaattcataaaagaccagcttctaatgtgttttttgttcttaacatcagactactggtctttttgtttgagctcaagtccaaattcaaaggacttgggcttttttaattatttattcaacttaccgtaaaaaattatacacttagcagtcgatgtgctaaaatttaaataatgtaaacgaaaggcaacaaataaatatgaaacgacaaatctcattcggccaagcattggctaccgtagtcggttctgtcatcggagctggcgtatttttcaagatcggaacaattactgcacaaactggcagcacttcaatgaccctgtttgtatggattttagctgggatcatttcaattgcatcaggtttgaccatttcagaaattgccgccagcttaaaaattaatggtgccattaagtatcttgattacacttacggccgcgtgtggggttttctttttggctgggcacaaatgattgtttattttccagctcaaattggtgccctaagctcaatttttggcgttcagtttgtctccttatttggaattaaggcgaggtattctaacctaatagctatcttgctagtgctttttctcttaggaattaatctaatcggaactaaattttctagcaaaatgcagtcggtcatcactatcctaaaaatcattccaattgctttaattattatttggggattatttaatcctgccaaaatacttgcaccaattattccgttaacagtcggcactggacattcatttccaaccgccattagtcaagggttactttctgcgttattcgccttcgaaggctggattgtagtgactaatttggctaacgaagtcaaaaatccagaaaaagacctttcacgggcaattattttaggtctttcagcaattacattgatttatgttttaatcaattatactttcatgaccgttttacctattgatcaattaactaataacaataatgccgcgtttcaagcttcaatgaaattgtttggtcagtttggtggaaaactagtcactgtgggaattttaatttctgtttacggtgcggttaacgcattcatgctgacagggatgcgtacgccttatatcttggctcaagacaatttattgccattctccaataaaattggcaaggctaatatccataccggtgttccagtagttggcgcgtttattgttgatgctattgcaattgtcatgattctactaggtaattttactgttttaactgacatgctagtcttcgttatgtggactttcaacacaatgttgtcagttgccgtaataattttgagaaagcgtgagccagaattaaaacgtccatttaaggttccatggtatccgatcattccaattatttccgtgatcggtggtatcttcatcgttgtctcaacaattatcaatcaatttgttctttcaattattggtattggtttaacattgttaggactgccaacttactattacatgcaaaagaaaaataattaacgaaaaaagccgccgattttgggcgactttttatttgagtaaatatatttattaatgttgtgaagcaccgctagttgcatcattttcttgatgatcttcataggcagtattggcagcaattcgaccaaaagtgaaaatatctgccaaggagttaccacccaaacgattaccagcatgaatgccaccagcattctcaccagcagaatatagaccatcaataatttgaccatctttattcaaaacatgtgccttagtatcaattactaagccgcccatagtgtggtgaatagcaggctttctcggagtagcatagaatggtgcaacttcacatttgaggcctaatacattcttatggaagtctggatcctcgccacgatcaacgtaagaattataatcctggatagttttaaccaaaactgctggattcattccaatttgttttgccaaatcttcaagcgtatcagctctaaacaaggttccagccttaacttgcgcatcaagtgactcttgggttgtattgtaagcagtgtccttaatcttatcgtccgcaatttgataaatcaaaccaccattttcgataactgccttagccaaaacatcccgttccgcaaattcattaacaaacctcttaccctttttgttaaccataatatagttagcaggcggagttacaacaccagtgaaaagctcaccggtctttggatcagctactggcattaattggataaagcccataccgaataagtctgcaccagcttcaagacctaagttaatcccatcgccagtaattgcaggtgaattagttgttgtactatcgtctgcaatgtttggccaataggtattgtatttttgaaccatcttagtattggcaccaaagccacctgccgttaaaattactgccttagcatgcacagtcaaagtactactgtcagcgcgtgttgcaattacaccgcgtactttgccatcttcaataattagtttttcaacacgagtttcaagatatggatcgacaccatgctctcttatccaatcacccaaaacgtgaataaaggcataacctaatggctctactggcttatgacctctgcgccacaaaccaccaactggttctgtaacttgagaattatcaaacttaacacccaaatcttggagccatttaacagaatttaaagcattagttaccaattcatgtaccaaagcatatttaccatgaatttcgttaccttttaaatcagtccttttaccacctaaataagtttgaatttcatggagtaaagtcgaatcaaataaataatctgtaccagaatcaatatattctttgatttgtctttgtaatctttcaaaatcaaagcggtattctaaatcaatttgttcaattggcgtattagccaagtcttctaaagtctgtttttcaccaggaagagccttaaatttactttgccattctggttcagccgcattcattggaccaccagcacggctagtattaccaccgatctgtggatacttttcgagaacagccaccctttcaccatgttgaattgagcgaactgcagctgctagaccagcgccacctgcaccaactacagctacatcaacagtaatttcttcatcttctacctttgtagcagcgggcttttcacggtttttccattcggttgaatcgccgcctgcttcatcaattgcttcggctacgccatcaatcacaccatgactggaaatagtcgcgccactgaccgcatcaacgtttaaagtttgattttccacaattgttttaggcaaacgtctaaatacttcatcggctactcccttagtttcacctgatgaatctactttgattgaagtaactttatcgccatcaatgtcaacttccattggcattgattcggaaccatgacctttagcttttacttgatattttcctgacttcattgcttacacctctaataagtttaattttatccacaagttaatattagtgcgtcatctgttgatgtatcaaatatcaatttcactatactttcataataaaattgttatgagataactatgtttcgttctccaaataaaaaaagcttaatgcaaatagttatccacattaaactttttaattgcatgatttaattaataaactgaaacttgaaagctaagattaacgctccttccccgcgcctcttggctttttcttatcaaaaataaaaacgcaggatctctctgcgttatactttaagtgtcaacctgaaaagtaaaggagatcctacgcaatgaacagtatagaacaaatcgacacagaaaacgataccaaatccttaatttcttcatttattaatctaattggtctagctaagttgactaaacaagtcaactttaagcgtaaatctaccgtttcattaaccatgattatctcttggctgatgtctgtacattttgctcggctttccttattcagagctaagagtgacaagcgtttttccgttagaactgctcgcaatgtacttaacgatggaagaatcaactggcaaaaactattatgcttgattgcagctcggctcattggctgcttcaaacatccgtaaaaagaaacattatctttattcaagcatagttgaggctcaatatcatggacatatctttttattaaagctcgtttttgtctccaaccgtggaaacaagaacaagtatttagttttagctactactcagacaaagcttagacctaaagaaatcatccaactttatggtcgtagatggcaaattgaaacatattttaagacgtataagcaatatcttgctttagataaatctcaagttcaaagctatgatggacaatgtggctatatcgcagttacagcaataacttatgatctattggcctggcaggaaagacaaaatacagatgataagacaatcggagatttattctatctaatgaacgaatccttacctgatattagattcgtagatgcattggtctacttaatttcagaattaaaagagcttaaacagaatagttttgaaaagatagatgaagtaatcaatgactttattaaccaactgccacgattcatacaaattgcactgaaacagatcatataaaaactaattacgtctagaaaagctcaatagtgacaggacttgagcttgattttggtgctttcaagtttcagtatttaaattaagcttcagaggcgcctgatacagcatctgcttcttgttcatttgaaacagtaaaataattataattggtattatccgcagcagtcgtacctgcaacaaaaccagaagcatagctccaagaattcatcatacttggcattgaatcatgaccattagcaccaccaacaatttctcctgcagcatagaagttacttacgggattcatatcattgtcaagaagctgcatttgatcagtagtttcatatccacccaaagttgtgcagaacagaagtttttgttcaattacataatatgtatcgccttcgaactcatgcataaacttcttgtctctaccaaactcaggatcataatctgctttaacatcttcagtatagttatccacagtttccttcagcgtttgataatcaatacctgctttttctgccacggtcttcaagtcgcctttgaccagaactggactcttctcgccaaccaaatcaaagaatgattgaacctcttccttggtaaagccatacttaagcattaattcatagaaacggtcccaggttctttgatccatgacaatgtaagctaccttacccttttgttcagcaatcgcatccctaaaatgcgtataaggtgcagattcgttaactattctcttaccatcagtattaacaaaaatagcccccatatcggtcgcttctttagttgaataagttgttagcttagcaataccaggttcaacttccaatccatgtggatataccttataccagtctaagttacgagtaaccaaattcatatttttggcaaaatcaagataatcaccagttgaagtcattggaccataatatggaatatcagtcttatgagcctgataatcacgtgcaccccaaccaccagcagctaaaacaagtgacttgaaattgacattaattgtctggtgcttgccttcagcggttaaagataccagtttgccagccttatctttattcaacttttcaacacgggcatctaagataatttgtccgccctttttttcaaatgcctcagccaccttagccactagttcatatgagctttcactaggcatttcaatttgacgatatacactatgttcaactgtttgggtttccgctttttgataagtcaaatttgcaaattcagtaataaagtctactgccttcccaatattgttagctaatagctttgacaacattggataattagtaccgcggcattcacgagtaatatcttgaactagtctatttggcgaatccttctttgccgtttcaccaaataattctgcagaaactttagagccagttcctacaacatttgagccatttaaaatagttgctccacctaaatagccatttttttcaagtacaactacttttttacccatcgaaagagcacgacttgccgccattaacccggccataccggagccaattacagccacatcaacatttagttgcctttcttcatgtacgacttctggcttttttccgtcaagagcaatgttattttcggctaatgcttttttaccagaatctagcattgcttgagtcatcaatgatgccccagaaaaagcgtccacgtcaaaactttgattatcaataatatttttctttaatttaccaaaagtttgattaaaaattgcaggagtttccgaattcttggttactttgacatcactaattttattgttttctaagtcaatctcaaaatcaatttgaccattgcgaccatctgcttgagctttaatagtttgtttggtcataaaaactactcctttacttgttctttttactaaaccgcttatattataaccacaatattaaatctaaaaaataaatttaatttgatattttaatagaatttttttatcaaaagcagtaaataaaagcgagtgatcattctcactcgcttgattctttatctaattttcatccttatttattagcgtaatgttgaataacttctggcttcaataccccaacataaggaaggttacgatacatatttaaaaagtccaaaccataacccactacgaattcattgccaacctttgaaccataatattctaattcaacatcggtagttcttctggcttccttatttagcattgcacaacacttaacgctcttagcgccacgtgccataatgtgttctttcatgaatttcaaagttaaacccgtatcaacgatatcttcgacaattaaaacatcgcgatccttcacgtcagttaccaaatctgatactatcttgaccttaccagttgactcaaagccatcaccataactagaaacatcgagaaaatccagttgatgtgctacgtccatttgtcgagttaagtcagtcaagaagtaaattgcacccttcaaagccccaacaactaccggctttttaccagcatagtcctcagttaattgcttacctaaacggacgcacatctcatgaatgtcatcttctgtgaataatttgtgatctataatttggtcaatattgtcgccttttgccatttaatctacccttcaattcaatttacatatattattcctaataaaaagaattataacatctttaaacaaaaaaagcgtcattttcaacgcttcctctgaataatttctaattttcatcctttgattgatcgtctttttgatctttatccttaatcggttcaacgataaaccagcgcataaagccttgttcgatactgtctaaggtaaacttatatccttcaagttcaattgattcaccctttttcaagttaggataatgttccatcatgtaaccaccaatggtaataatatcgctatcttgaaaggccttcagatctgtatggaagaaacgctcaaagtcatataaagtcgtcttacctgaaacatgaacttgaccatccttgtccttgataatgtaatcatctgaaacatcatcaatttcatccttaacagaaccgaaaagctcttcataaatatccttatcagtaacgatcccactagtaccaccatattcgtcaactactaagacaattggtgtgtgcttagaaatcatcaagtgcaagatatcttgaattggcattgattcaggtaccgtgataatagttctaataattcttgttactggtacgttgccatcaatttggctttgttgcacaatgtcgtacgcataaacataacccacaacgtcatctttatcattatcacgcacaactggaaaacgactgtagccttcttccaagtattttttcaaggcataggcaattgtatcagttgaatcaagtactgacaatcttgttctgtcagtcatgatgtccttagcaaccttatcgtttaattcgaaagctctttccatataagttaagtcttctttatcaagcgaaccaccatgaaccgcattacgcgacaacttgatgatttcagattgtgaataaacttcattttcttcatcagctggagtaaagcccatcaattttaagattccattggagctagtatttaatagccaaacgaatggataaacaatcgtatggaaaatatgaagtggcgtaacgatccccatcatcatcggtactggcttgtcaatcgcaatattcttaggcacaacttcagttaagacaacttccaaataagttaataaaactacgcctaagattgcactaactgacttgatgagtgaatcattcattggcgtcaaatggaaaagatcttccaatatggttgcgaatgtatcagccgagaaccaacccaagactacaccaaccaaagtggtaccaacctgagtagttgacaaatactcattcaagttgtgcgtcatatgcaaagcacgacgcaactttttcttatttccttgacccttagcaagcatatcttcgagctgacttggtctagtttgaactaacgcaaattccgcagcaacaaagaatgatgcaacgataaatattaataatgttgcaactaaattagttactatttgagctggactcaaagtattatcacctttttttacaaatatattactaaaacctattttaccatttcttgcctaaaatagtgcagttttacacaagggataacggttttttgtaatttattcgaccaccttgtaaatttcattaaacggtacacgctttggaataaatttaggatcattaatttcagcattcttgtcgatatagccaactgcaattgccattccgacagcttcatcatctggaatttgggcatattctctaaccaattctgggtatgaaaccattgagtgagctggcatcacacctaagccacggttaatggctaaaagcatgatactttgtgcaaaaattcctaagtcaaaaacggaccaagctggagatttcttcggaaccgttaaaaagataattgctggtgcattgaacattgttttattcgcatcattaaataattgaagcttatttctgaaaaagaaactttgggatgcacccatcgtagccatattacgacttggataagtatcccaatctagtgatagcattgaagcaaaatcttcatgtgcaacttctttatcatcaatctttttagctgaagcagccttaaacttgcttaaagcatcccccatcaaaacatatgcacgccatggctgagaattaagcaatgaaggtgattgctgtgccattttaacgattccagcaattgttttttcttgtaattttctattagtaaacttccgcgttacatgttccttttcataaacatccttaaaattcatttttcctcaattcctttttgcttatataataacaatctatattttattatagtaaaaaactgttaaaaagcttaattattgctcttttcttgctttttcttttctgctgcctgtttttttaaataagcactcattgcaagatcattttttcgcatagcaataaacgcagtaatggttaaagttaatccgccaagacaaatcacaagtaagccaatcggaaacaagaagtctgctcccttaggaataaatgatgccttaattacccagcatgctataccaattaacatcaaaactatacccacaatgactgccttagtgttcggtcgatatcttttcataaatgcccttctttcttaattaacattctaacagaaaaagcttagcttcaacgtagaagctaagccgaaaactagagaaatagtcgttaaatttttacatgagagaggggaaagttgactatttaagttcgatagtttgtactttttgggaatgttcaacactgcctttttcaatcggagtaactgacttaatcaggtccatgttggtgtagacaacgatgcagctgtcatcgtatcccttgtctgtaatcatttggaaatccattgtggctaagggttgacctttcttaactttatcgccttgactaacattcactgtaaacggagcaccttttagttcaacagtatcaagacccaagtgaatcaaaaactcaataccttggtcattcgtgataccaatagcatgtttagttgggaagagtgtggaaatactaccatcaactggtgcatagatatgattatccttaggcttgatagcatagccatcacctaacatcttagttgagaagacatcgtcttttacatcagtaattggcataatgtcgccgtcaactaccgcatctacttcaatacccttattctttttcttaaagaaattaaacataattaataacctctggatttctaaaattcaagtaataatatcaacataaagcttgcgagtaataaaccagctgcagtaagtgaaattgcgattattactcgactaacgccatcttgtgtcttcttcaaagctcttgctcgataaaaacctaagatagctaatactacgcaaagcaagttgccaacaaagagctgagcaatcatctgacttcccatcaagaagcgataagtctgtcgattgattaaaaactgcttgtggtttaacaacatatagtagcctagtatgaagtcaacgatagcaacgattgtactaatcgcaatcatcggctgcttcataatcatcatccgaatcgattgaccagaagcaccgcttcgtagtgcaatcatcgcccaaaacaatagtggagcaatgaaaagtacgtatgaataccaagtcaaaatcttcttagtatccaagtgcatgctttcggttattcgatcgataaagttgccaacttttcgtttactaattgcccacattgatctctacatcctctccttgactctgttgccaagctacatattcactaattaccaaatcaattaagaagtacgctggggtaaaggcaaccttcccgctcttaaagtcggcatcatcagtaaaggcaatcgttggaaaataaatgttgtgctgcactaatgaagctaatttattttgcttcaggttagtgaacgaaacatatttgaatttatcattcactagttccaacttagtgatttcctcattgatcgttttattatcacccgtaaacgagataataaacaaaacatcgcctttttgagcaaagcgtcccgcagcttttaactcctctaatgctgatggcaaaacagttgcatgcttgccaactacaaacaattcatgagccaaatattgtgcgattaactcttgttgccaaccagtagagtaaatgtaaattgtccctgcattatctaaatcgcgatacaagctattgaaatcacgttgtttgaaatacttcaacacgtctgaatttactttactaagttcccgcgcaaaattattttcaattttgattggtttttgcttcgattcggctaattcgaccaaatcaaatttaagctcactgtagccacttagtcctagctttttacataaccggaaaattgcggattcggatacataaagctttttagctaatttggctaagcttaatttgctacagtctctcggattatttagaacatattgaactatctgtttttcagaatcattcaacttatgactattgtcatagaccattgatctcaaatttgccataatacctgtgcccttatcaatatataatttatatattaatgataacacaagcgctttcagattatagcaattgtttcatttgatcaacaacttgatcggcatccaatccgacaacgatgtcaacctcgttgttatctttatgttgtacttcgtaagaatctgcgatcttcttgaattctgaatctggagcgaccttcttaggatcaacgacatgagttcttactctagttgagcaagcaatgacatcttgaatgttggagtcaccaccaagcaagtcaacgataccagtagctctttcaatataaggattatcttgttcagttgataccttagcgtcgccaccttgttgttgcattaaagtgttcatttcatcaagaacttgaggtacgtccaaacctacgataacttggatagccttaccgtggtgtacgacattgacagccttgtttgctttaaatgcggcatctgaagcaactttatttggatcggcaacagatacacgtaatctagtagcacatgaactcaattctgtaatgtttgaaggaccacctaataattcaaggtaagcagttgctctttcaatgtaagggtcattagcgtccttaccagcagcttctgcagccttcttagccttgtattctttctttgaaagaaggtgaacatcttgatcatcggcttcacgacctggagtaatgtaattgaacttctcgatcatgatcttgaagacaaagtaagtaataataccgaagataataccaacgataaattccatcacataggtcttccagtggtttggccaaagtggaatccagttcattgaagcgataccgatcgcaccatctgacatgaatcctcttaaaccaaaggcccacataactgtgttcatcgtggctgacaatactgagtaaactacccaaagaactggagcagcaaacaaataagtaaagtcgataggttcagtaataccagctaatactgaggttaaagcagctggggtaagcaaagctgaagtttgcttcttcttgttcttcttagcagttgcgtagaaggcaagacagataaatggtactaagaataccttttcgttaccgtaaagttggaatccttcaactgaagcgatttgtgaaagtggtttagtacttgcagcgtattcagcaaggtgtttcaaccagtatggttgcaaaccgccggcaacaacggctggaccgaattggaatggaatgtataccaagtggtgaagaccagtaggaatcaatacacggttcaagaattggtaaatccaaacaccgataaatccactatctacgatgaagtgttgcatgctggtgatacccatttgaacttttggccagccccagcaggtaatgagtgctaaaggaatcattacgaagaatgctaaagcgtagacataagttgaaccttggaaagtaccaagccagtctggcaacttcttatcaaagtacttattgtgtaaccacactacaataagagcaacaaccaaggcacctaagatactagtgtcaagagtcttgataccagcaatgttagttaaaccatggttagtagcgttagcaacaatttggatcttgtcaaagttaggaataccaaaagctgcaccccagtgggtaagcattgcaccgatgaagtagttgtaagtcaagtaagcaataactgcttccatggctgctctacctctagccttgttggctaaaccgattggcaaacctacagtaaacaaaataccttcttggttgaacactgtccaaccaccagctgaaattgtgtcccaaactgagttccatgtagttcccgggttggcaattaaaccaaacagagtcgggttattgaacaaactacctaaagctacgacaatacccgcaaacgagaacagcataactgggacgaacatagcggccccaaaccgctgtattttctgcatcataatcgtttacctctgaagaaaaaaattaaatcaataacttattcttacatctacacctgcatctacatctttatttcatcagatcaagtcaaccgcaaggtgctcatacaattgacttttgccatttgtgcttcacacaaatatttactcctcaaaaatgttttaagataaaacgtccagttgatatcaaattctgaacttaactctatcttagtagctagcttacatttttatttataccatagttttaagctaatgtaagcgttttttaaaactatgacttattgtttcataaagttaagatgatatttcatttcatgaaatttatttcagcccttcaatgatgtatataccaatatttatacccctttattttgcttgtcgcgcctatgtttaatcatttactttacatacaaaaataacatgtcaataaatatgctatagacattctctatttatacacataaaatcctctgaaatatatttcatttcatgaaacgaaacaagtgataaaacctttttcctttccaagatgaactactttgcttactgaaataacacaaagtctggcataattaacggtaagttaaatgcacaggaggaattattatgacaatcaaatttattgcacttgataccgacggtaccttgcttaattcaacaggtaagattttgcccagtacaaaaaaggcagttaaaacagctttagaccaaggaataaaagttgctttatgttctggtcggccaatcgcaggattaaaacattttatggacgaattaggaattattggacctaatcaatatgctatcactcttaatggcgcaattacccgcacagcagatggcaagataatgactaaagatctagtttctaatcgactttatcgtaaaatgtatgcttttgctaacgagcatcatttaccttttaacgttgtttcccctgattcaaaaataattacaggagatcatgatgttgatttaatggtttatactcaagcttacgaaaatagtgcgactttatacattagagagctagatgaattgcctagtgattttgaaattgctaaaggttgttttgccactaaagctaagttgttagaccaatgggaggataaaattcgccaagaatttgggcaagagctgtatattgttcgtgccgacgattgcttcttagagctacttcaccctaatgttaataaaggaaccggattaaaagaattaactgaaaaacttggcattactccagaagaggtcatggcaattggagacgaaagaaatgatattaccatgtttgactttgctggaacagctgtttgcatgggtaatggctccgaagaagcgaaaaagcatgctgattatgttaccacttcaaatgacgaagatggcatcagcaatgcttttgagaaatttttatgaacaacctaaaacaagtatctgagaagtgattaatctttcctagatacttgttttattatttgttcaaatattcacgcaaagctggcaaaactttctccgcctcaactcgtccgacctcatacactcgtcgcatctcttttttatctgtttctaaagtgccaatttcaagcggaaacggtggacgaataataaaagcttggtcagcagcttcatcttttaccatctgatcaagcaccgcattataatcctcagctttagtagccaatttttttactactgcggggtatttccttaaaattactttttccagtggatagagcttactctgctttttgcgataagacttcggctgtgtagcaatgactacctttttatcacagttttgctgctctaaaaaatcatacggaattgaatcagatacaccgccatcaaagtaataatgcccatgaattgcaactggatgagcaaaaaatggaatcgacgacgaggctctaatccactctaagtcaacataacctgcatcatgtaattgatgataaaccggctcacctgttgcagcatcagttgcaacacaccaaaagtccattggattagtcataaatttttctttatcaaaaacatccaacttatcaggcaaaatatggtaacaaaagttagccgcatacaaattgcctgaccgccgccatgatttccaactagcataatatggtttccccgcaaagcgcatgttgtagcgcaatactcttcccttttgctccgacttcaagtttacgccaaaggcagcaccggctgaaacgccaattgctaaatcaaaggttatgtcattttctaaaaacacatcaattacgccagctgtaaacagcccacgcattgctccaccttcaagtactaacccacttttcatattttccctctttatcaaaaaagacctacgcttttcgcataggtctaatttattcttattttaattttacttcaagcccgaccattgccattcggttacttctggcatgtctttaccattgtcgcggatgtattggtggtgcttttcaagcaagtaatccatgtgactgatgaagtccgcattcttgcccttcaaagctgggatgctttctacggcatccttagctaggtcaaagcgatcaagatgattcaatacccgcatgtcaaatggggtagtaatatcaccattttcttcatagcagtgaatatgaacattgtaacgcttgcgagcaaaccaaatggattccatcatgctcttgtagccatgccatgcaaagattactggtacatccttagggaataatctgtcaaattcttcagttgacaagccattcttgttgtcctttggatccattaacttcataacatcaactacgttaatgtagcgaatcttgagatctgggaacttcttatgcaaaatatcaattgcggccaaagtttcaatagttggctcagtttcagttgaagcaaagacaacatccggcttagcacccttatcagttgaagcccagtcaatgtagcttaagcccttgtcaaccaacttttgtgcttcttcaattgagaaccattgtggacgaggctgcttagaagttaccaaaacattgatgcattctctatctttcaaggccttatcgccaactgccaaaagcgtattagtgtctgatggcaagtattcatgaacaagatctggacggttcttttcatacaagtgagtcaagatgcctggatcttggtgagtgtaaccattgtggtcttgttggaatacagttgaagttgcgacaaagttaagtgatggataatcatgacgccagtattgttccttagcctttctgagccacttcatatgttgagtaagcatagagtcaactacccggccaaaggcttcataagtagcgaagaagccatgacggccagtcaaaacgtagccttcgagaaagccttcatcttggtgctctgacaattgtgaatcaattactcgaccgctaggagccaggttttcatcatttggttcatgaatctctggttcccattgccgcttttgatcgtcaagcaattggaacagacggtttgacttggattcatctgggccaaagccgcggaaagtagttgggttgagcttagcaacttcatccaagtacttagcccattcaaccatgtcttgtgcctccatagaacctggcttgtcaaacttcaaagcaaatttgcggtagtctggcaagttaagccgcttaggatcaagaccaccgttagtgattgggttcatggccattctatgttcacccttagcagtgttttcagttacgatttccttaggtgaaccgtcttcattaaacaattcttccggcttgtagcttttcagccaatcagtaagcatatcagcgtgttccatatcgccttgagcaactggaattggaatttggtgagcacggaagctgttctcaattgggttgccatccaagtccttctttggaccagtccagcccttagggcattggaagataatcattggccagtgtggcaaagtagcgtcattgttttcacgggcgtgcttttgaatagccttgatttcttcaatgacttcatccatggtcttagccatttcttcgtgaacctgcattgggtccttttcaccgtcaaaacgaccacccttaaagactgaaacaaagtgaggatcccagcccatgccacggaagtattcggttaattcttgatcgctcatgcgagaaacaatggttgggttagaaatcttaaagccgttgatttgcaagattggcagaactgcaccatctttaattgggttaatgaacttgtcactaaaccatgaagcagctaagggaccagtttcagcttcaccatcaccaatttcaacagcggcaataacatctggattatccaaaacagcaccagtaccgtgtgacagtgagtagcctaattccccaccttcatgaattgaacctggagtttcaggagcagcgtgagaagcaacaccgcctgggaaactgaagcgtttgaatagcttagccatccccttttggtcctgggtaatctctgggtaacgttcagtatatgaaccatcaagatatgagttagaaaccattacctgaccaccgtgacctgaaccctcaatatagaacatgttcaagtcatacttcttaagcacacgattcaagtgagcataaataaagttctgtggtgcaatagtgccccagtgaccaattggcttaggcttaacgtcttctgcaaccaatggggtcttaagaagagggttcttcatcaagaacaactgaccaactgacaagtagttggctgcgcgccaataagcatcaacgctctttaaatagtcttttgagtcataatcaactgccatcttattctcctttgagcatctaagagtgctctttttcatttgttcttttgtttacacttatatcataccaaattatctaaaaagttcaactatttttataattggatcctaccaattaaaaaataagtatttaatttaaaattgcatcccttttttgttgctatatcaaccttttaatgctttgatataagtatttagttgcttaaatactgataagtacagataaacaaatatcaaatactgacataatcagtgcaaaattattcattcatgttagattactaaatggagggcatgagatgacccaagaagaaagattaatacaaattaaacagttacttaaaaaaaagcaccaattatcaactagacagattgcagctcacttcaatgtatcatttgatacggcaagacgagatgtaattcatctaactgaaactggtcaagcaattagagttcatggtggtttgatggaaattaattgcaacagcgtacctgattttttagcaagaaatcaagtacaatcaccggttaagatgaaaatggctagaatggcaaagagatttgttcatccaggtcaatgtgatttcatcggttcatcaactacgttaaagcagctctgtccaatgcttaatggtattgacatgcagatcgtcacgaattcaatcgacaacgcattaagcttattagcaatagaaatcccatcagtcagattgttgggcggcgttatcaacaaaaagcagcgtttcatttattctgaaacagcattagaaacattgcgtcaaatccatttcaatactgcatttattggtggatctcgaatcagagatgacggcgtatatacaccaagcatggctgattccaaaattgtcgaaaccgccgctagtcgcgctaatcaagttgtattagttgccgaaaaatataaatttactaatcaatcctcttcgccatacatgtctgtccccctcaatcagatcgatgtccttattaccgacaccccattgcctgaggaattaaagcatcattttaatccaaaaacgcaaattatacctgttttaaaggagtgatagttatgttcagtctctttaaccaaaagaaacaaagcgaaagtcgtgaagtataccaagatttgaagaatttttataatagtttttttagcaatatctacaatgaaatgaatattggtcgctatcggcagattcgcgatgcaattgggcttgttcttaataagttcgacagtggtgatcatcctcttgaatacactagcaaattggtcatgtatattcaggctcgaattgccatgaatcacctgcatctaactcatgaacagcaagacctaatgaaaaagctaagtgacgctaccaaatatgtaaatctttcttatgtttatctgagtccgctcacttcggtagaacaatttgttaatatttaagtgtatctagaacctgctctagatgaaaaaatgaatccaaaaagaccgagtagctgatctgctcggcctttttatgcaataatattgttaaaagatatagattttttcaaaggaaataattatgacaaaattaccattcaaagttgttgctgtcgatatggatggcactttcatgcatgatgatcaaactttcgatcacaagcgctttgaccgcatcttaacagaattacacaaaaaggggattcactttatcgtttcaagtgggcgcccttataccagattacgcaaagattttgctggctttttaaaccgaatcgacatgattgctgacaatggctcgcttttgcttcaagataatcaaattattagcactcatttgctcacttataaaacaaccttagatctaataagttttatcaaagagcattattccaagagttcaattattgtcactgggatcaacaattcatatacaactattaatgcttctcctagttttaagcagacgatgaacttctattaccccgatcgaattgaagttactgatttagcagcggctatcaatccgcaggatatgattactaaaatcaccttaagttatcaatatgatttttccgcggaattagaaaaagaattcaaccaaacccatgccgagaagattcactgtacttctagtggtttcggtttgcttgatattgtgccttacagcgttaataaagggagcgctctaaaatacttcttacgctattttggtgctaaacccaatgaattaattgcctttggcgacggaatgaatgatgctgagatgttaaaactagccggttacagttatgcgatggctaatgcagaagatcaagttaagaaaatcgccaagtatgaggccccgagtaacaatgatgatggggttttagaggtgcttgattcatatttagctaaagtagagaaataataattactgtaaactaaaaccgtctgaatgagcaaaataaaaaagtagccaagttttcttaaactaattgacttaagaaaacacagctactttttatttacccaaattaacaaaggtattaaagttcatataatgataatgcacgcgcatatttgatacttcaaacggcgtcccatcatccaagaagaagatcccttccattacaccaacaggttcagtcggcttcaaatttagcttctgctgatcttcttcattcgatggttcaacagtgatattcaagaatgacttagtaacggtctttccctgttcatcttccaaatagttaaacaaagacttttgtaaagtctctggctttaattccggcacaattttaatcggcaaatatccagtctcaattaaaaatggttgttcatctaacagtcgcagacgcttgaattcataaacaaaatcattttcatttaaaaataagtcttccgcaatttctttagttgccttaatcacatgaaaatcaagcaacttaatttgttgttttttaccagggactttaaaagaatcagtgattccaagattcgatccatcataacgaaacattgcctgtttgcgcaaatatagtggattaataaaagttccactacctcgctttttaaaaacgatcccttgttgagccaacagctccagcgcacgcttcattgatgatcgacttacctgatagtgttcggctagactgcgttcatcaggcagtcgcatccccttatactgattattcaaaatattctgtttaatgtcatgcataactgtccgataaacataatctgccattattctcgtccttgatctgcctttttaatactatcaataaaccaagttgcaaacttatccaagtccacatctgtcgcaatctccgcattggcatgttcttggtccataaaatccattacgctggcaccataagtatattgcccgcgcaattcaatattcacatttgcctttttcattgtaaacatttccggatgaagcataattccaactgcagtcggatcataaatcttaattcgcggatcaccgtctggttcatgaatgttagagaaaagtgaatacaacatattacccacttcaccacatgtcttaactttatccatttgctctggtgttaaatgggccttatttccaatttcaagtggagcaaccttaactagcaatccactatgaaaaactacctgcgctgcttccggatctcccgcaatattatattccgcaaatgggctatgatttccgtgaccaatattaccacccataattacaatttccgcaatattttctttaacttcaggatattgcttaaaaagtaaggcaaagtcagttaatggtccaatgcccatcagagttattttttctggactacttttaatttccttagccatcaacgttgcagcaagaccaggttcaattaaagaatcatcagcttgttcaaattcaaagccggcaatccctgttttaccatgaaccgaagcagcactaatcattggtgccaccagtggttgattagcacccactacgacaggaaccttagtatgcaaaaacttttctaaatttaaggtattttgcaaggtatatttcagtgccacgttaccccaagtaggcacaatcatgcgcacatcaagttcttgtgcaaaaagactaatcgtcatggcagcaatgtcatcaatgccaggatcagtactgataattaaaggtttcttgttcataaaattatcctctcgtattaagtacttttataatagcaaaaaaccaaccaattaagaaagtggttggttttattctaataattatttttcttttttgggtttaatacgttgaatgtgttcttcttcatggtcacctaatactaatggcacacgctcaaccacagtatcggcatactccagtccgaaccaagatgcagggttagaagataaattctgcagccatactcttgcttcaaccatgaacttttcatagcctgtcaatttagttaatggactaattacgtcgttaacaattacaaaggcgaagtcccctacatcacgacccggtgtagtagtgaattgttgtggttgagcttcaatcgttccatcagcgatcaaatcatgaacaatttgccgcaaataaacatttacactggtttgttttctaaaacctaaatacaactgaacgttaattacattcttagtaccataagtattgaccgcgtattctgcagtatatggctcgttagtaacattaacagttacaaaccagtaagccttagcccgtttaggtctcttatccaaaattgaataaagcatttcgcgcttaatgaatttattatacttaaccttagccatataaactacattcgtagcgtaaactggataatcatcacagtggctcaactcagtcaacatatctgtatattcatctaagcgaacataagcattctgctcctcacgcttatcacggatcttattgccatagaaccacacgtacatgattgccaaaataaaaccagcaattaaaacagtgacgtaaccgccatgcaaaaacttagttaagcttgagaataagaacatcccttcaataaaggcaaagactactaagaaaatgcatcgtattgatagcgcggtaccttttttacccagatattcaaataataagatagttgtcatcaacatggtaaccgtgatggccagaccatatgctgcttccatatgatgtgaagttctaaataagaaaacaattgcaactgtaatgacacagatcatcttattaattgaaggaatataaatctgtcccttctcatttgaaggatagataatattcattcttggtaaaaattttaaactacttgcttcagctactaaagtgaatgaacccgtaatcaaagcctgagaagcaataatagcggcaatcgtagccaaagcaatagcaaacaatcttagactacttggtactgcttcaaaaaatggattgaaatcaccattaccagcatgataattagcattttgtaaaatccagacgccttgccctaaatagtttaaaatcaagcaaacaaacacataaggccaagagcccataatattacttttcccgacatgtccgacatctgaataaagagcctcagcaccagtagttgccaagaaaattgaacctaaaatcaaaatacccactttattagcaggactaaataaaatacgcaaagcatgaattggattaattgcatcaagcaaactccaatcatggcttaagttcataaatccaatgagccctaaaaaagtaaaccacaggagcatgattggaccaaaggccttaccaatcacactcgttcccattctttgaattgaaaatagtaaaaccaggataacaatagtaatcaagataaccatatcttgcgacgaaactggaattacatcaccaaagcgcatatttttcaatccttcaattgaagttgtaacagtcacagctggagttaatgtcccatcagctaacaatgctgctccaccaattaaagctgggataactagccatttagccctctttctaaccaatgcataaagagagaagatccctccttcaccatgattagtcgccttcaaggcaattatcacatatttgaccgttgtcaataatgtaacagtccaaaaaatcaacgaaatggagccaacaattagttcacggttaacattactaatcccaccattttcagtcacaatcgacttcataacatacaaaggactagtaccaatatcaccatagacaataccgatagcaattaaaaggccagtaaaagacaccttttgcttaccagatattttattcataagtttttatcctctatttcacttaaaaattgaaatttttactagtatagaaaaagtctagattttttgcaataaaaatatatctttttgaaaaataaaaaagaagatgaaatctccttcagtcacttaatttactttttcttatcttcgatggtgccatcactatgagcaataattacttcgtcacacatatccaggaacaagccatgttcaactacgccaacagtatgatcaaggtaatcagctaaaccatgaggtgctggaacaggatctgcagccaaatcaataatataatttccatagtgagtcacataacgttgattgccatccatacgccaccgaggctttaatccttcttgttcaaaacgtttaaagttttgttcacaagaaattggtaaaacttcaactggtaatgggaagccgcttaaacgatgcactaattttgattcatcaacgatccaaatgatcttcttagaattgattgctacatttttttctaaagttaatgcaccaccgccgcctttgattccatccaagttatcggtaacccgatcagcaccatctacagttaaatcagcttgatcaatatcggccaattcactaactttaaagcctaagccctcaagttgttttttactacggttactagtagttacgatagccttcagttttaagccgtcttcatctttgcgcttacctaaagcatcaatgaaaaaggcaacggttgaacctgtaccaacgcccaataccatacctgatttaaccatggcagctgctttttctgctgcttcttttttcaaacgatcttgttcttgcttgttcattattcatcatcctccatcgcctgtttaacttcctgttcagttggaattgaaggctgagcacctaaacgttgtacggcaattgaagatgcacgacttgcaattttagctgcttcttcaaagttagataggccagaatttaaattgcttaccaaatatccaataaaggtatctcctgcaccagtagtatcggctgcttcaactttataagtcggtattaattcttcaacatcgggagttgaaatatacgcacccttatcaccataggtaataaccacgttttttacaccaagcatgtgtagtttttctgcattagtggccagcgttgaattatctttaattgcaatgccagtgatcttggcactttcagtttcattcggtgtaatgatatcagtatattgcagtaattctttaggaatctcatcaactgcaggagctggatttaaaatagtgatttttttggcctttttagcaatcttaaatgcttcaagcgtcacatctagtgggatttcgaattgagcaattacacaatcccaactcttaatcaaatcaccagctgcacggatatcttccactgtcagttcataatttgcgccgtgatcaataatgatgtcattttgcccagcttcattcaacgtgatataagcatggcctgtctttgctcccattgtggtttgcacataagttgtgtccacgccataactcttgagctgatgcgtgataaaatttccttcactatcttcacctacacggttaataaagtaagtttcagctccacttttagcagctgcaattgcctgattagcacccttaccgccaccagcagtagtaatgtctagcgcattaattgtttcaccaggcttaggaaagtcttttacatgtaatgttgtatcaacattacttgaaccaataactacaatcttcttcattatgagcatcctcttctaaaaatggatttattcaacctcaattataacaaaaaacgtattcaaaatattgaacacacatttttgaaatcttactgtaaaataccaccattaacgaagccttttaagcgctcagcttcccacttcaatgtatctgaatcgtcaacttgcgagatcttatacccaacgaaatatggtgaagcatagaatcgtggaataatcttgcaacaagtaccttgaccatcattaattggatagaaaaataagttataagaatcaacaccatgtgacaagactgaacgcacatattgtgtgcccttttgaatcaaatcggcccaagtatccaaattagtattatcatgtgtcaaaatatttacttcttggtagccttgaactggacgcgctgataagttcatttcaactgaacccgaacgcccgacttcaaatcctttaaagttatcagcgccaatatcgtgatagccatctttatgatataagcccacgatctgcatatgtggatgagttaaagaaccatcagacttgggaccaaaatttttataccaaagcacactctgataacggcctgaattattcattttttgaaaacacttcaagccaaacttcatcaactcttgattatcttcacgcgtataagttgaaatatctccctggtgatcacttgattcaattaaaattgtttgattagtatcctttaacgtagggtacttattcttcaaccaaatcttatcgccatctttttcataaatattaattagatgctgcacatcacaaaaaggacagccagcattctgatttccttgccgattaccataatcataatcatatggcttacgcttaccaattgaatattcatacactaaaggattcttgtccatatttttcacctgctaaaccaaagatatcatacatttaacatcattttaacaattttatcggttaattgtgaacatttttattaataaagctaggaatagtacgtctatctatgataaactacctttgtaaaagaaatacatgatatacatgagaggaagaatcatgaaattctataaaaaattggtacttactggtgccgcagctttagctgttctaggcttgagtgcatgttcaaataataattctagttcatcttcatctaataagaagattccaactaagattaacaagaagactaccgttaccttttggtattcactaactggtaatgcgcaaagcagtttgcaaaaattgactaaagattttgaaaagaaaaatcctaacattactatcaagttgcaaagccaaggcggcaactactctgatttacaatctaagttggtttcaggtttgcaatcgccaaaggatttaccgacaattactcaagcttatcctggctggctttacaatgctgccaagaacaatatgcttgttaacctaaccccatacattaacaattctgaaattggctggggctcatatgctaagagtggcattaagaaagctctttgggatggtgcaaacatcaacggtacacaatatggtgttcctttcaacaagtcagttgaagtacttttctacaataagaccttacttgataagtatgatgttaaagtcccaactaacatgagtgaattggcttctgcatccgcaaaaatttaccgtgaaagtcaccacaaagtacgcggtgttggatttgatgctttaaacaattactacatgatgcaaatgaaggaaacttacggcaaagacttcaataagaacttaaactttgctgccaaggattccgttaaagccatcaactactacgctaatggagtaagagccggctacttcatgcaagctggtactgaaaagtacatgtcaactccattcaacaatggtcgcgttgctatgttcatcggttcaactgccaatgaagcttaccttaagcaaggacttaagaagggttacacttatggtgtagctgctcgtccaagcacgatgaacgtacaacaaggtactgacatttatatgttcaaaaaagcaaccgcaatgcaaaagtcagctgcgtttaagtaccttaagttcttaacttctaagtcatcacaactttactgggctaaacaaacaggctacatgccagttaatactgctgctatcaacgacaaggtttaccaatctgccaagaacagcaagataccagcaattattgccaagacctctaagaacctttacttcttaccagtaactaagaatgctactgccgcatatgatcaagttaatgctaacatgcaaaccattttagctaaggcaagtaaaaagcaatcatggaatagcgatatcaagactggtaaagataagcttgatgctgcttggaagcaataatttttcaaataaaatatctatcaaaaaaagaagttcagtattaattcaatgtcattaagttaagacattgacaaattatcgacttggacttttaagatcattcatttgcgatttatcgcatttgaatgctcttttttcatgccaaataaacccaaatcttgtttagaaattaggctacacgatataaataatatacagctgatttgggtttgagatttcttttgtcttttcgtcctggtctgatcggaattgtgtaatgactaatttgaataagaatctttttaaagatttcagttgaagaagaaattatatacatagcctggatgacaaaacatgactgtttgaaattgatcgcatattgatacttgcattttttttgtggtacatatgcttgagcatcaatttgactgactgcgttaaacataatcatgtgggcatagatctccatttcaataaatctatcctgcttggaatgaaactgtacgctacctaaagcatatttcaactttttgaatgaagtttcaatgccccagcgcaaatggtagatttctttgatcctttttaagggataatcggctctatttagattagttagaacaacttcccattcttctttgcctgatttaggatcattaattctaaatttacaggcacgaaattttattgtacataactctccaaagtcccagctgccatctttggtatttttagaccgatattttatatattgacggtaatgatggttaaccaaatgaacgttttctgtagccttatgggtttcataataataattagaggtagtcacccagcaagctatatccttatcacactcttgattaggcaactcagctacttccttaaatgcgccatatcccgttttagtacgtatgacataataacagttaggcaggcgattacaattttcaatcatgttaaagccggtataacctcgatccatagtaactatatatggtccgcaatttagctttttaagcatttgaacggcggctttacgttcatccatctttgacttaggctgaaagatgcagtcttgataagtattatttaacaggtcatagagtgcattaacatgaatttggcaatatggctttcctttatgattgagatttccaacgatattctctgatttaggattccagatttgattaaaatcagacccatcaatggcaaatatacgatatttatgatcaaataactggatattaaataaattctgattaaatacagttagaatatgcttaaaacatgcgggtgaaagctgacctttgcgttggacataagcggaagtactgactactttatcgttatttttaatagctttttggccaaaagctctaaacaactcactggtcaaatcttttccttgcatattaatagtagttttaatgactgtagctgcatctaaaaaccgcttcctagtgaaggcatgaggatcatcgataaaatcatgaatatgctttccagtatcattgataatttgatcaagacgatctaaaatatttctgtgaagggctttcataattaacaccagctttctggcaataattttgaaggtttaataatttaatcagagggcgaaaaggtaggttcttttcgcctttattttatgcaaaaaaagaaccaaatcataatgattcggttctacagagattagattcaatttgtcaatgtcttaacttaatgacattgagtattaattgaacttcttttttttacctaattatttactaaaaatggatattgaatttgatcattatcagttacattcaacttgtaacgagcacgatataaagccttttctaccgctaattgccctgcagttgtggccattgcaatcgaatatgacttgtgtggtgaattgatcaggatttgactgatagaatgcttaatgtatgactggattagaatgacataattcgattccttacatgcacgtaaaacattagaagcctgtttcatctcgataattcgagctactccattgtgtgcttcaatcaccttagccaagttagaggttaagctcttgtctcctactacaacggtaactcgttttttatcgaggtcaaaatcaattcgggaagcatagtcttcattttgcttttcagacgactgcttctcctttttttctaattgatgcaataaagacttgtgtctacctttagtcttgtgcttttccgtttctttatttttatccggcttttccttcttttctggaatagtaacttcagcttcggcataacgccatctaaccctaatgaaggatggatcactgactcgccaaacaatactaatcaggtcattttcgtgtaagttaaagtgacttacagtattcatgtctaagtataaaatagctttttcaggatttacttgacttaggtttttgccattagagtcctgcttgatgtataaaccaaaagaatcacggtgaactaccgctggaccaaattcgataatttcctcatctggcgcaaaagactttgcatgatgctcaactttaataattggacgattgccactgtcatttaagtgatctagcaaagtaactgtatcaccgttttccagcttttcaattctagtcaagtgttcattaaaatattgtactgaatgaccattctcatccactgcttctgcacctagcagcttacgcctaatctcatattgtttttcctttggtttagccacaggaattattttcttaaccacaggcttaggaataggagttatggtcgcatatttgtttttattctttaaaaccgtaggactcagagctttagcagcttcttcttttttagctttttctttttcaagctcttccttcgtttttttcggctttattttttctacagtattttcatcattttcttttttagtttctatttcagttttattttctagcttattctcagtttttatttctggctcattttttacagcctgatcagctttttccgcaattttaacgacttcattcttattctcaggtggattgcctagtactgcctggttatatattttactaataattttcaacgcaatcattgactgcttcagtgattggggatcgctccccgtcgcctgcattaaatcaataatatcttttctataatcaatcgtcatatatttaccttcttatttcttaaatatgaatattatacaaaaatttttaatgctaatctaattctttatagatttttatattatttttcctgtaaaaccattataataaaagtagttaaaatatcatttattaaatgagggagactactatgaaaaagaaacttttacttttcgtatcctttttagccggtttattgttcttggtatctacaccaacttatgctagcaagcttcctaaaggctatggtattgctaaaacctttaccacaccaaaagcaacccgtggcacctggtattatcgcgaaaagggtgataaaacaatttctaaggtaaagatcactgctcatagcgtagatggtaaaaagctttacgtaccttcacaaaagttcttcgagaaaaatgtttacaacgtttcagctaagaagcgtaatcagttcatcaaaaaaactgaaaatatttatgctgcagctaactataaaaagggcttcaatgtcaacaattgggttaacttagctggtgatggtgaatactacatccctgttactagaactgttaacggcaaaaaggttaaggcattaagaatagctactggtgctggtccttatactgctgcatatgcatacaaaactaaggcattggttaaataatcattgtctaacgaaaaagcaaattagcataatttgcttttttcttttaccgatttttacttttccgtatttctccttcaaaaagagcggtcaattttgccaaactcttatgatcaggatagcgttgaactaattgctcaattttatcggtagctaatttttttacttcttcggctgagcccattttctctaaaaaatctgccaaatcacctgaacgagcaagtaacttacgctcactacgactttctgccagaaaagcttgatcaaccttacgtaacttcaaactaccatctgcattaaagtgatatcctccccacatatgctgcttaattggttgcatcggttcgctatccacataacacaattttcctaccatatggtgcgtctcagtaattcctaacgtaaccgggtcataaatatcgacatagttaaaaattttctcccgcattttagccacctgacgtcgttctgttggcgttaataaaagccaaatattggttccttcatacagataagcagctgcaattgcttctggatgacgacaattagctaaagcaaactgagcattaattgaacctaacgaatgaccataaatataaattctactacctttaaattgattaattgtctgattcaataagtgagcagctgactttaattggctaggaatcgtccgttttcgtgcaagcagtgcttttaaaattggtagattagttttaatccattcatcacgccaagtttgtggagtcccctttttaaaaccatatgatcctttaaataagattgttatttcattcggacttgaaatgacgaaggctcgcatcccatccttagcataaacattacgacaaacagttccaagataatgttgatctattttgatagtatcacccagctgcaattcatcatatgtctttttagttaattcaactcgttcacgatctgttaactgtgcatttacactcataatttttcctaaaataaaaaactaactcttactattatgttagcatgagttagtttttttggataatttgagcctttaatcatattttttctgcaagtaatttgcaatcgttgacaagcagaaacagacaataaagtacatgattgcaataatcacatacattggaattaagtaagtcgtgttctgactgtaaataatttgtgcgtggtataaaagctctggcaaaacaatgatagttgccaatgaagtatccttaaccaatgatacaaattgtgataataatgccggaatcatattgtgcaaagcttgtggcataattacatgatacatagcctgaccatacgacatcccgttggaacgggcaccttccatttgacccgaatcaactgagccaattcctgaacgaacaatttctgctagcattgcaccttcaaagatgactaacgctgcaattgaagctgtcgttggattcgttacaatacctaattgaggtaaaccaaaataggtaaagaagatgatcaacaatagcggcaagtttcgaataatatcaataataaagcctacaattgcagacacatacttaattttcatgtagcgaactaatcctaagattaatcctactacgaagcttaatgcaattgaaattaatgaaacataaatcgttacccaaagtccttgtaataagaagcgaatatcgacccatgaatatgcatgaataaaagtttccattctctatccccttcctattagctgactaattttttctctaaatgacgcatgtagtaactaagcggcaaagtcaagatcaagtagaacaatccaacaataatataagtatcaattgtttggaacgttgagaacgcaatcaattgtgcttgatacatcaagtcaaaaccggcaacaaaggccaaaactgaagagtttttaaccaagttgacaaactggttgcctagtggtggaatcactatcttcatcgcttgaggtaagatgacataacgcatggcttgcacataggtcataccgttggagcgagcaccttccatttgaccagttccaattgaattaattcccgcacgaacagtctctgcaataaacgctgatgtataaagcgttaaaccaattgtccccgcttgaaatcctgacaatttcacaatataacgtggaacgatcaaataaaagatcatgacaattaccagcaaaggtatatttctaaaaatcgcaatatagatcttcgcgatcacttggccaaatttagatggtgctacctcaagcaaggcaaaaatcacgcctaaaatcaaactgaaaactagagcaataatactacttaaaatagtattccaaaaacctgttaggaagctgccccagttgttagtaataatttgccacattatttcaaaaccccctttagactaaaaccaggaattccagcaaaccactttttaatcaaacggtcataagtaccattcttttgtaattcattcaaagcttggtcgatatgatcagccatttgtttttgtcccttattaacagcaattccgtaaggagcattactatagacgccgccgactaacttataaccaggattttcttgagcgataccggcaagcaagccgttgtcagtagttaatgccacaccttggttagccttcaatgcagacattgcttgaccatagtcatcatattgcaaaatccgcgctttaggggcatacttatgtacatcatcaactgcggtagttcctttaacggccaaaacagttttgccttccagatccttaacattcttgatcttactattattaggcactaacaaagatgaaccggctggaaagtatggcttagagaaggttacttgcttggcacgttctggtgtaatagtcattgtggctaaaacagcatcaacatttccattttttaaaagtgggattctagtgttggcagtagtagtaacaaaatcggttttagcatctttacctagcatttgcttagttaaagccttagccaaatcgatttcaaacccttcaatatgtcctgtcttaatgttcgttaagccaaacaatctagtatctgctctaacgccccaaacaattgtcttactttcttttactttttgataaacattattgctagcatgcttgccacaagcagtcaaggcaagtgccaagattagcaataagggaaagaaaaaaaatctttttaattttttcatggcgtgccaccttaatctttagaaatgatcttgcttaagaattgacgtgcacgttcagtatctggatgagcaaagaattcttctggcttgcgatcttctaaaatatgacctttatcaaagaaaattaagcgattgcttacttctctagcaaaacccatttcgtgggtaaccacaaccatagtaatgccttgttcagcaacatatctcataacttctaaaacatcttcaatcatttctgggtcaagggcactagttggttcatcaaataaaatcaccttagggtgcattgctaatgatctagcaatcgctactctttgtttttgtccaccagataattgatgaggataagagtcaattttatcggccatacctactttttcaagatattgcatcgctactttacggttctcatcatcaggacgctttagcacaatcttaggcgccagcataacgttctctaacacagtgtgattattgtagagattaaagtgttggaataccatcccaacatttttacgaatcttattaatatcggtctttttatcagccaaatcatacccagttacaattaattgaccgctattaattggttccaagccattcatagttctaattaaagtactcttacctgaaccagatggaccaataattgaaaccacttggccttcatcaatctttaagttaatatctttcaatgcatggagctttccatagtacttatcaacatgcttaaattcaataattgctgtcatggcttctacctttctttcctttgtctacacaatataattattttactcttcttaaagctaaaactaaatattttagcaattcaaaatagtataatagcctgctaatcttataaatttgttcggttttagcaaaatatatttgtatttagctagattaaaataatcatattaacgctacttacgaatttattaactactaactttcaggataaagaaaaagcccatcatcccctctagtttgggacgaaaggcttttttccgcggtaccacccacattgtctaagtatagaccaactcatgaagcaccgacatgcttcaccggcgtggtaacgtaccggagacgtctcgacctactataagaattgttagttcggtgagctgctaaaagtgtttttcaatagttcagggtctgctggcttttcactaacaccaactcactgctaagaataaactacctactcgtctttttcatagccttttaatttatttatatgtatttaacattatttttcaagaaaatgcaagggaaaataatttaaatcgcaaatgtatccgtttttaattaaaataaatgctgttaatattcggaaaatagcttagaatattagtgatacctagaaaattaaaggagtttgatatgggaaagcttgaaaaacccgttattattggaattgctggtggttctggtagtgtgaaaacaacaatcgcacacgaaattgccgataacatcgatgatcaagatcgaattatgatcatgacgcaggattcttactacaaagacaatactggcgtatcaatggaagaaagaatgaagatcaactacgatcatcctgatgctttcgatatgccactacttgaggcacaattaaatcaattgatgcacagaaagccaattgaaatgccaacttatgacttcactgctcatcccgtagtgatgaaactattcacgtcgaaccagctgatatcattattctagaaggaattttggtactctttaacgaagatatccgcaatttaatggacatcaaggtttacgttgatactgatgatgatatccgttttattcgtcgacttgaacgtgatatgaaagaacgcggccgctcacttgattcagttattaatcaatacttgggcacggttaagccaatgtacaatcaatttattgaaccaaccaagcgttacgccgacatcatcgttcctgaaggcggcgaaaacgatgtggctatcgatatgttaactactaagttgcaatcagttttaagtgaataattatcgagatataacaaacaggcaagctaggaataatacctaacttgcctattttaatactctaaattatcttagtttttcttatcatcctgtgcattagctgcatccaaaatacggttatatttcttagcaaagaataccaaaagcaaaacactggcaataacataaataaccgctgcaatgtagtaagcattagcataaccatcttgcgtattaaacaagtaaaattcagtgaagagaccatcaataactccaacgatagcataggcaatttgaactacaccagtaaaggctggacgcaagtccttgtcaacaataaccatctgaacttcttgctgaatcggcatcgtggcattggctaaacctgttctcaagaaaagcagaattgcgacaatgacgaataagaaggctccgctacctaaccggcgaccattagctaacaaaagcataaccggtacacaagttaatgtacctgcagcaaccgacacgattgcaccgagtttcttttccaaaaatggagcaaagaagtaaccaattagcattgctgcttgaacaaaagtgttgatggtagaagtaacatcacgtggaatgtgcaaataactattcaaataaattggcacataaacggcaactaaacgagcaccaagttggataccggcaatataaacaatccacatcaatgtcttcttgctcaaaagcttcttatacatggccaccttttcaactctgctaggttctttatcatctgcagtagaacgatagtcacgtggtacatcgtgaataaatagggctaagataaaggctaacatcgttacagcagctgtaatataaagtaaaattctgtatgaatttgtatagtcagctaaagtttggccggttaacatttcagaattacctgatagaactgaagcttcgtgataaggaatccctctaattaagccaaagaaccaaacaacagccttcccacctaagaaagtacaaattgtctgcgtaatcaagttaacaatcataacggttgagaacatcttagttctaatcttccctggaacatatgaagtccacatcagtggatacatcaaatcataaaccccaattgctgtccaagaaatagtataagcgatcatgatgataatttgattggttgtgatacaggttaaggccataaaaattgccgtcattggtggcaagatcagcaaaatctttcgatagccccatttatgaaccgtcgcaatcatgactgacatcaaaattgctgtcgccgcattaaaaatgtttaaacctgaaatcaagtgtggcgctacaatcttgtagtaagacaaggctgcatcattcgtaatccctgttactgcacctaaaataccataaatccataagtagacaatgacattgtgtttataacgtggattccaatttttaatcgcctcatcctcagcttccttttccgcattgcttcgtcgagccatataagtccccttccccttttatgaaaacgtatacaaatatctaatttaatcttagcacctatatagtattaataaagtgtgtgtatacgaaaaggtattgattatatgacttaggcaagccttggctttaatgctttatcaaatagattagtaatcaattttactagtacaccatcaaatactaatgatgaaatcatgctgacaataaacatcaaaatttggacattaatttgatagtgactccaaccaaataagaagtagctgggaataaagccacccaaattagcaaaaaaggcaccggtcaagacacttttccaagagaatctttcataacgttcctttttagggaaaaagccaatttcattcattgccccctgaattaatccttcaaaaattgtcaaagctccccattgtccgccgatcgccatttctacagtcgcagccaataattcaccgattgttcctgcacccttagtcggtacaaaatacattgctagtggtgccgccatgtaccataatcctgtaaaaatattatccactactggtgcataacccgtgggcaaaaaactcaatttcaccaagttatacacattattaaaaccataagtgtaaatcacgcccatgattattccaattaaagccactaaaataattgactttacattccattttgacgatctagtaaacataaaaatgctccttactaacatactgtcagtaggagcacacaaataaaagttaattctcttgttagcactttcccttgcgcaagtattatcttgttcaggttcgaagggtattatctcagcattacgcacccctagtgacatttcatttatttatcaattaagtcaagtatagcacattgttaatcaaatgccatttgatctgtgtaaagtttgtaataaaatcccttttctttaagcagtgcctcgtggctgccttcttcgatcacattaccatcttttaacacaacaatcttattagaattcaagatcgtctttaaccggtgagcaatcacaaagcttgttcgtccagcaatcacagtatccattgccttttgaatcttttcttctgttaccgtatctacgttagaagttgcttcatccaagattaggaatggtggattcgttaaaattgtccgagcaattgacattaattgcttttgtccagttgaaaagattgagctagcatcgctaacttgagtatcgtaaccatcaggcaaagtctcaataaaatcatggatattagcctgcttagccgctgagatcacttcatccattgaagcattcggcttaccataacgaatattgtccgctacagtaccagtaaataagacagagtcctgcaggacgatcccaacattatttcgcaatgatgttagttgaatatcacgtacatctgtcccatcaaaggttactttacctgaattaacatcatagaagcgatttaacaggttcataatcgtagttttacctgaaccggttggtccgaccagagccactgattggcccttatcaaccgaaatatttactccgtgcaaaatttctttatctttattgtagccaaaatgaacattttctagcttgacaccatgattcaaaccactaatgaccttaccatttggcacttcgttttcatctttttgttcttcaactgtagctaatcttcttgccccagttaaagctaattgaatcatggaataaattgaagtaatttgcgtcaaaggttggaaataaacttgtgaatattcaacgaaagttacaatcaagcccaatccaatagcctgagaaatttgaccggaaataatcatccaagaccccatagcgatgacaattgccaaattaagtaagttcaatccgttcatcaatgggaataggattcccgaataaaattgccccttaaacaaagcgattcttactttattgttgtagaccttgaagccatcaaccgattcttgacgcaaaccattggtaataatcaccttttcaccattgatctgttcggtaatataaccatttaaatcgccaatttcatcttgctgcttatcgatataaacgcgagcttttttcattaaaaggacactaataatcaaaatgaatggtgttgtcgcaatcgtagtccaagccaaagtactattaatcgtgaacatcacaataattgttcccacgaacataattccctgggaaataatttcaaaaatcgcattgttcattgcgttgaaaatattatcccaatcggaagtaagtagcgataaaagtttaccatcctgatgagtatcaaagtagcgcactaacatccgttgaaacttggcaaatagattctcacgcatgtcattagttgaatccgcattgaacttggacattaccatccaagcaataaaaatcgctatctggctcaataagtaaaacaagaacatcgaccataacgcgctatagaacgtgttcatggatgctgtacccttttttaaatcaaccaaataagtagttaaagcagtaactgaacggcctaaatatgtaggtgccataacctgtgcaccactcgaaatcagagaaaggataactacaatagtgattcccttccaataaggcttcaaatacttagcaaaatagcgcaatgcctttttcgtattactcatttattcatttcctcctttcttacctttttgtgtcttgaagatttcttggtaaaccagcgaagtcttaagcaattcttcatgcgtaccttgtgccactaatttaccgtcatctaacactaaaattgtatcggcattaatcactgaaacaatcttttccgcaataataaaagtagtagtatcaggcagctcatgctctaaagcttgctgtactttcttctcactttccgcatccagagcagaagttgaatcgtccaaaattaaaattggtgctttagcaatcaagccacgtgcaatagatagacgttgcttttgcccaccggaaaagttagcagaacgctcctctacttcatgatcgaaagaatcgttataacgctcaataaattctgatgcttgcgccatattggcagcacgctgcaattcatgtaatttagcctgagcattaccttgacgcaaattagatgctattgtacctgagaaaagaactgctcgctgcaacacaaaagaaacagttttgcgtaatgcagcttcagttacatccttaatattttgaccgccaatttttactttacccttagttggatcatataaacgagcaattaattgggccaaagttgatttaccagcacctgttgccccaacgataccaaccatttgacctggcttaatcttaaacgaaatatcctttaaagtaggatcatccccatcaggataagtaaaggaaacatgatcaaactctacgctaccgctaagaggtgcaaccgaaccactttccacaaacttgacatctggttcagtctccaatacctcacgaatacgtccaagagaaatattagctcttgaaaattgcattaaggtcattccggcaatcatgatcgtaaatagcagggttaaaacatagttcacgaatggactgactaccgcaatatcacttggatgtgccgtaatatttttaccaattaaataaacaattaaagcaattacggtataagcgatcatctgaaaagctggcataattgcagagaaccagtaaccaatcacaatgttgtagtcattcaattggtccgaagtttgatcaaactttttaatttcttgtggaccttgattaaatgacttaaccactctcacaccttgcaatgtttcttgtgcttgattagaaattcggtccatcatttcttggaatttggtaaacaaactattcatttgtcttaaaacgtaagcgccaaaaccaaaaataagtgcaaccatgaccactggtgcccaccagaagcgcggaataatcacgatacagaagataaatgaaccgacaattaaaatcggcaaccgcaacatctgcataaatagctgcatcatcatgttcattacctggttcatatcgttgatcaaccgtgtagttagagaacctgctgaaaatttcttaatattaccaaaagagaacgtttgaatcttagcataggtatcttcacgtagatcactaactactccttgtgcaattttcgctgcaaaataaacgttaaaaatacccgaaataattgcaattatacctaggactactagccagattccatcagacaagactgcttgcttctgattcgccatcaatgccttttgaatattttccaataatttaggctgatataatccagaaaacgctgaaactaagatagcaataattgcacaaacaacatcttttttataacgctttaagtatggaagaattattttaaagttttccatttttactcctttcttcacttaaaaaatgccaaaaagtagtgctccattcttctgaaagcttagctaacaatttcattttgtcagttcccatggcttgagccgttttttcctctaactcaaatagaggacgcaacctgtcataagcatatttccgccctgcttcggtaagctggcaaaatcgaactcgcttatcgctaggatcaacagtcatcgtgatatgatcatgatcacgcagaatcttaattcctttgttaatcgactgcttgggtaaatcactcagatttactaattctctttgtgtcaattttccccgaatcagtaattcatacatgattaccactaaatagtcaggcaagtcatgatcctgctcccattggctataagcacggctgccatggataattgatagatttaatttttctgtctcactaattttcattacttcaccaccatatttagtctacatgcataccaaatatattagtatgcacatggactattgtcaaatcattttgtcaaaaataagactataattaaagtaaagaaacaatttttgcatctaaatttcaaattggtataataaaaaaatcatcaagtaaaacaaggcagggattatatgcgtaaaaagtttttattaataatttcaatagtggtcctgtttgctttgccattaagtggctgtaagcaaaacaaaaagcaaaacgtttatcaagcagttaaaactagtaaaaccattaactggggcgtcaaagccgacacgccattattcggctcaataaatattaaaacaggcaaacttaatggctttgaaattgatttagctaatgcattaacccatgaaatgctaggcaaaaatgtcaaagccaatttcataacaacaacggccaacaccaagattcagcttctaaaaaacacgaatgtcgacgccgtcattgcagcaatgaccattacgcctgaacgtaaaaaacaagtcgaattcagtcacccttactttcctgctggacagtcaattatggttgctgacagtagcgccattaaaaatgctaaaaatttgaataacaagaaagtgcttgtagttaaaggaactactgccgccgatgctatccatcaagttgctcctaaagcggaaattttacaattcgatgattacggccaagcttttgccgcattaaaagctggacaaggagatgcctttgtaactgataacggaattttagctgggattttgcgtgatagttccggctataaattagttggcggcacctttaccaaccagccatatggtattgcagttaataaggggcaaaatgacatgctcaagcatatcaacactgcattagcaaaactagaaaagaatggcacatataatcacctagttaaaaaatggtttggcaacattcctggtatgaacattaaagaactagaaaagaagtaagaaaaaggctaagatcaaaattttgatcctagccttttcgcttatttagcaatgaaatcaagtaaagtaaacattacatctttatttttctcaggcacaccatgattaataatctctgtaggcgtttgatgtaaatccttattttctaaagcatatgctccatcattaatagcaatctcacgtacattatcaatttgcggttcaaagtggaactgcaacccaattacattatctcccagtaaaaagccttgattcttaactagatcactagagaataataacttagcttcggttggaatttcactcatttgttcatgccaatgaagagctgttaacttatccggaattcctgtaatagtctgatcttgcaaataaactggtgcccaacctacttccttagcgggtgcatcaagtaccttatagcccaaagttttagcaatctgctggctaccaaaacaaattcccaagatcggcttgtgttgatctaacatttgtctaatcaacacacgttcatttttgacccaatcaagatcatcattaggactgtttggactgcctaggactactaatagatctgtttcatcaacagttggcaaaataccaaaattccctggatggtaaacgaacatttcgttatctctagcatggcaccaggcttgaatagaaccaggtccctcattaggtgcatgctgtaatacattaacgcgcataaaatccctttctcactcaacaatatttttgtttttcattttatactcaattctagtggtaaacaagaagaattcagttaatcttttactatatctttagaaactatatgtcaccttatatgatataatgttatacatatttttacatctggaggacttttatggacaatcaccttaaacgcagtattggcttaggttctgcactttcaattatcgttggaaccattatcggttctggaattttctttaaacaagcttcagttttagatagcgcaggctcaacctttatggcacttttagcatggattttagctgggattatcacattaaccgccggcttaacgattgcggaaatcggtgcccagatgccttatactggtggactttacgtctatattgaaaaaatttacggccgcgttttaggttttatggctggttggatgcaggctattgtgtacggtcctgctatgatagctgcagttaccggttttttaagtattatggtgactaatctctttggcatcggcaccgaatggcgtattcccattggtttgatcactatcatcgctatcggtggtttaaactttttagaaaataaagtcggtgcagcctttgctataatcactacaattgctaagatgatccctatttttgcaattatcttctgcggcatctgctggggtgagcaaaacgctgtcgcccaaactgtgactgagctgaatcgatcaacaggtggtcttggcgtagccgttctcgctgccctttttgcctatgacggttggatctttattgctaacttaggtggcgaaattaagaatccacaaaaattattacccaaagcaatcatcattggaatcactacagtattagtaatttacgcgttaattactattggtatttttagtttcatccctgccgataaaattcatgcattaggtaaaaattcaaccacttatttggctgacgctattcttggtccaattggcggtaaagttctatctgtcggcattattatctcaatgctaggcactctcaatggagaaatgctcacctttcctcgtattatttacgctatggctaagcgcggggatttgcctttctcaagatttttatcatacgttacacctaagggaaaagcaccagtcattgccactatgctcttaattaccttaactggaattatgatgactttcttcgatcctgattacctatcaaatctctgcgtcttcacaatttatagtttctatgttttagcattctttggcttattcattttaagatacaaaaataaggaccaacgtcctttcagcgtaccgttttatcccctaattcctttagtagcaattgcgggcgggctcttcgttttagtcagccaattcttcaatgatcccgctggcgttttgctttttactggaattaccgctgtcggctggccaattttctttttagttaaaaagatgagcaaagcacagaacacgattatcgaagactaaaaatctcaaatttttcttgttcatttttaataattatgatattctaattaaaattaatttaggagattcaattatgatttatcaagacaccacattggcatactcatctagctcaagttccaactgaacttgagtgattttggtgtacgtaaatcagcagccggattcactcaatcgtttctagacgataaggtgaatccggctatttttgtataaaggagaaaaaatggacaacaagcttaaacgcagtattggtttcggctcagctttttcaattgtaatcggaactatcatcggctctggtatcttttttaagcaggcttctgttcttgacagtgcaggttcaactacaatggccttactagcttggatttttggtggtctaattaccttggctgcaggtctcaccattgccgagatagggggcgcaaatgccctacactggtggtctttatgtctacattgaaaatctctatggccgcattttaggctttatggctggttggatgcagatcatcgtgtacggtcctgcaattattgccgccgttgctggttttatgagcatcatgatgactaacttttttggtttgaatcattcatggcgcattcctttggctttaatcacagttttagcaattggaatcatgaatttcttcgaaaataaggtaggtgcaatcttttcagtcataaccacgattgccaaaatgattccgattgctgtaatcaccatttgtggaatctgttggggtcaacaagatgcgattaaccagactgtagcagaggttagccaacacactagtaacttcggtgttgctgtcttagcaactttatttggttacgacggttggattttaatcgctaatttaggcggcgaaatgaaaaatccccaaaaattattacctcgagcaatcattgcaggaattacagctgttttggctatttataccctaattacaattgggattttccgcttcatccccgctaatcaaattcaccaactaggcgaaaacactactacttatctagctaacgcggttttcggtgcaatcggaggtaaaattctttccattggcatcatcatttcaatgatgggaacattaaatggaaaaatgctgacctttcctagaatcgtttatgccatggctaaacgaggagatctacctttttctaaatacttagcctatgttactcctaaaggaaagtcacccgttgtggctactttatttattgtccttttagcccttttaatgatgattttctttgatccagaccacttatcagatctttgcgtctttacagtttattgcttctatcttttagccttctttggaatttttatcctaagcaaaaagaataaagcagagcgtcctttcagtactccactttatccttttgtgcctataattgctattttaggcggtttatttgttttaatcagtgaattaattaatgatccagctggtgttttgctttttgctggaattgtcattatcggcttaccgatcttctacgccgttaaacgcatgaataaacatcgcttgtattaaagcgacttttctacactgtagcttgcacgccacaattcttccattttagctaaacgatgccaatctcctttttgacacattgtatacaaggcatgagcaggatcataagcaattggattgccctctgcttcttttaaataagccccaacaatgctgattaacatcatccgaaagcgttcaatctcattacggctaaagtaagtttcaaaatacttagttactaagcaatcaaccgttgcatgcgaagctttgcgcaaagaagcaggattcttacgatagttatacaaagtataagttgaaattccagttgctttacttaaactagtaatcttaacattacggtcagttattagtttctctgctctttgtacatcggttaaaattttgggatgcttaaagtgagctggcattgggatacgtttacttaattctgcaattaccttttcaacagcttccttcatttgctgcgtagctacttcttcgtttaccttgtcattaagcaattttcctactacaaacgtatgatcagtcacttcataccttttagtaactgcattgtaaaaataaccttcaatacctgtaatcttaactgcatcagttccagcttttgcatagtcaaaaaagatgtgttgctgatcaccagttaatggtgaaaatggcaaattatctagcgtaaaaacttgtacatttaaagtataatctgaatgagcgggatcatctgcatcacaatgatacatcttcacttcccgatcatgaataaaatcttcaaaaataagattttttccatattttttcttcatttcttaatccccttttatatagtcctattatctattataagcaagtgtctgggaaaaaactaagtctcagatcatgaaaaaagaacgttgaatttttgtttcaacgctctttttgtatacttttagctccagccttgatattattaaatcatcacaaaataaaaaaggtggaaactaacatgtacaagaattatatcacaggtcaaactgctttaacacttaatctagattttgccattccggccaatcatttggctaatgtcatcagctggtttgtagattcaattccagaagatgttttagtaggcaagactgctaaaacgggccgcccagcctatcatccagccatgatgctcaaaatactgctttttgcttactccagaagagttttttctggcagaaagattgagttgatgctggaagaaaatctgccaatgatgatcttggctgaccagcaaaagatttcatatcatactatcaataattttagatcaagcagccatgccaatgaactgattaaaaagagctttatctacttcactaacctgttagaagatgaaggcttaatcaatgaaggtgctgcttttatcgatggtactaagattgaagctgatgctaaccgctatacatttgtctggcgcaaagcggttgaaaagtatcatgaaaagctgaaaggccaggcagttgaactttatgatgaattgattactaaagaagtagtcaaagaaatggaaaaagaaaaagttcaaactagtcaggggctaaaggaattagctcaagaaactgaagcagaaattaacaagctgactaaagagattgagcaggaaaacaaagccattcctggcggttcacctcgaaaagccaagcgacgtggactaaaaaagattctgcaccggctaagaaaagattatgtgccaagaatgcaaaaatatgaagaagccgaagagatctttgccggacgcaacagttattccaaaacagatcatgacgccacctttatgcatatgaaggaagaccacatgaaaaatggtcaattaaagcctggctacaatattcaagcagtcacgaccgatcaatatgtagttgattatgccatctttcctaatccgacagatttcaaaactttggagccggttttggatcaaatgaccgtgttggacaagtttgacaaaatcgtcgccgatgctggctatggcagtgaatacaattattcgatgctggaggaaaaatatccagacaagaagtactttattccctacactatgtatgaaaaagaacagaccaaaaagtataagaatgatccaactaagctaatcaactggtactacaatgaaaaagatgattattacattgatcatcatggcgtcagattcaatttcaaatattacagccagcgcaaggatcgttctactggtcaggtccgtgattttaaggtttatgaggcagacgagttccagctaacgccagaattggaacaattggctaaaacagctagcggccgccagcgccaagttcgctataatcctaactggcaatatttaaaagaaaaagcaaaagaagttctccaaagcgaagaaggcagacacatctatggcatgagaaaatatgatgtagagccagttttcggacatttgaagaacgtatttggcatgcgcagaacgcacctgcgaggtaaagagaaggtcgaaaccgatatcggaattgcctttatgatgatgaatttgaacaaatattgtcaaagaaggtggctgaagggccgatttttattgttaaaaattttaaagagaacaaaaaaacgatcaagattcttaaaaaaggaaatcttgatcgtttttattcatctggaagctagttttttcccagacacttttctattccgcagctttctttgcttcatgatgattataaataaagtttgcaacatacccacaaataattagcaacaacgatacaatcataatttctctaattccggtatgaaaaattgtccgcattgttggcattaacgccttaggcaaactcttcgcagattctgcgtcactcaacttattcatcatggtcatcgtaatattgtggtgtccagcaattccacgtgctagagctaaattcataatcaccccataaacggcagccataatagtttgcgctaaaattctaatcaaaaaactaagcgatgtagcaggtgccatatccttttcaccagcgtcaatctgcacttttatttgaagaataacgaagattgagcctacacctaaaccagataacgctgcaatcgacatcaaaatctgatatggcgtactaattggtacaataattaaaccgattactgttattgcaatcaatgtaaaatcgaaaattaacaaatgataattattaaaatgtctgagtaaatgcggcgtactttgtgaaccagcaatatcaaagattgagttaggaatcaacgtcatcccaccgattaaggccgttgtccctaagattgcctgcgaccacatcggcaaataagtgttaactgcaatatatgcaccccaggcaaaggcaaaaagaatgaagtcaccaactaaagctttattagtaaaaaccgataatggcacgataggactagcagcttttttctcaactaagatgaaccagacaagcattacgatcccgataatcacgaaaatagccactagaaaattactagctagtcctaacatctgaattccaatcaaaaagcaagtcaaaccgccaattagggtaaaagcacctagtcggtcaaagacagtattgatgtttggcttacgaatgccacgataaaaaagaaaactcaagataattgataccaatcctaatggaacattgatataaaagacccagtgccaggacaaagcatcaacaatccagccaccaactagtggaccagcaatacaagcggccgaaaaactagctgcaatataactcaagatgacagttctacgtttaatattcggataaatataaccaacaatcacataaggaagagaacccattccaccagcaccgacacccatcagtactcgagaaacaaggaaaaagtaaatatcgggagccactccttctaaaactgaacctaaaataaataaggctagtgacagttcgaaggcaaatttgttacccattctttcaccaattttactccaaattggcactgagaccgacattcccagtaaaaaacaggcaacaatccaccccatatactgaattccgtgtagatcggacacaattgctggaatcgccgtattaataattgtcgcatctagccctgacataatattagccagcaacaaagacaaagtaaccattgatatttgcttcttagtcatttaatcccacctttttaactctaaaaactactattactcatagtatgcaagatttaactagcaaaataaagcacaatatttttccactaaatcttgacaatctgtgtttttccgagttaaatataaagaaaataatagtgatgacctttaaagttagtcccgtgaggctaagaaggaaatctgcacaagctaatactttttgtcgttagctaatacagaaggaccatcttgagccatgcgctcttggtggtctttttcttttggtcatccagaaaggaaaagctatggcaaaagaaataatcgatgctttaagcatgaaacgcgccttgatgcgaatgacctacgaaattgtcgaacgcaataaaggtactaaagatcttgtattagtcggaattaaaactcgcggttggtacttggctgagcgaatcgccaaaaatttgaaaaacttggaagatgttgaagtccctgtaggggcaattgatatttcacaatatcgcgatgatttaccagaggctgagaaggaaaagatgatccacagccaacaacttgacttcgatatcaccgataaaaacgttatcttagttgacgacgttcttttcacaggtcggacaattagagctgcccttgatgcgttaatggatcaaggccggcctgcaaaaattaatttggctgttctagtagatcgtggtcaccgcgaattaccagttcgtcctgattttatcggtaaaaatattcctaccgcaatgaatgaaaaagtccaagtctcaatgaccgaagtcgatgagaaagacagtattgaaatcgttaaataggagttttaaatgaataaaaaagaaaagtacagaaaccctgaggctatcttagacgtttatgaaaagcctgaatttggccaaggcgtactgctatccttacagcatatgtttgctatgtttggttctaccgttttagtgccaattttaattggaattaacccaagcatcgctctactttcatcaggaatcggtaccttggtccacatgctcttgacccacttcaaaatcccagcatacctcggatcaagttttgccttcgttgctacaatgcaagccttaatgaaggctgatggctacccggcagttgcccagggtgcgatcgcttctggtttagtttacgtagttgttgcgatcatcattagcaaaattggttcaggctgggttaacaaagttttaccaccaatcgtagttggaccaatcatcatcgttattggtttgtcattagcaactactgccgctaatgacgctatgatgaataattctaagtatgatttgacttacttcggtgtagctatcttcactttggtcatgaccttagttttccaaatgtgcttcaaaggcttcaccagtttggtttcaattatgctaggaattatctgtggctatatcttatcctgctgcctcggaattgttgatttctctggcgtggaaaaagcagcttggttcacattgccagcacttgatgtgcctggaatcagttaccacttcaaatggtatcctgccgctattttagccatggcaccaattgctttcgttacaatgacggagcacatgggccacattatggtattgaattcattaactaagcgtgacttcttcaagaatcctggcttacacagaacgatgatgggtgacggtctttcaacgattatcgccggtttcattggtggtcctcctaccacttcatacggtgaaaacatcggtgtgttagctatgactaaagtttactcagtttgggtattagctggtgccgctgtttcggccattatcttcagttttgtcggtaagcttgccgcattgatcgaatcaattccaatgccagttatcggtgggatctccttcttactctttggtacgatcgcatctaacggtttgaagatcttagttgatgatcaaattgactttggtgaaaagcgtaatatgttaattgcttcagtcattttggttatcggtatcggtggtgcttacctacaactgggcaatttccaacttacctcagttgccctttccaccattatcggaatgcttttaaactggattttgcctaagaaagcagctagtgaaaaggctcaagaagaaaagattaagaaagaaaaacaagaaggtaaaatttaccaatagatagaataagccatttaaaacccgttagttatcgcaatgatagctaacgggtttattttttactctcactttgcgcacacaatgttgtaagttgtgcgaaagttggcaaaagttagtgtaagttaattgtaaaagcttaagaagctaacaaagccctatatatcaaggcttcgagctactttagtaaaaactttgctctcactttgcgcacgcaatgttgtaagttacgcgaaagttggcgaaagttagtgtaagttgcgagagcaatagtatataatttattgacacaaataaatttaagtcatgaggtgacattaaatggactttttaaacttcaaagcaattacacaaactggtaattttaaaacaccatctgaaaatgaaaacatcgaatacaaagaagctagttggaaattacctaaatcattttgggaaactgttagctcttttgctaatacttcaggtggaataatgagactgtaaaatagtttgtgtaaggatgaatgattccttaaatttatttctttaaacattagaaaaaggagttcctttctcgtatgattggtttgaacaaaaaaacacatacagaaagaagaactccttcatgaatgattttaccaaagattttgctcaagctctattcaatccagacaaaataaatgatttattgcgcaaagagctacaacaggctgttaataacttgttagaagctgaattgactgcctttctgggctatgatccctatgccagaaatggctggaatactggcaactctagaaatggtgcttatttccgcaaagttcatacgcaatttggcccaattgaagtgcaagtgcctcgggatcgcaacggtcaatttcatcagcacacgctgcctgactacaagcagcactcggatatcttggaaagcatgattatcaagctttactccaagggcgtgaccaccagggaaatagccgatctaattgaaaagatgtatggcagccattacagtccagctcaggtatcaaatatttccaagcagatgattccaaaggttgaggcttaccacaaacgcaagctaagcgacaagtttttctgcgtctatttggatgcgacataccttcctttgcgccgagaaacatttgagcgcgaagcagtctatattgccattggcatcaagcctaatgggcacaaggaggtcattgactactgcattgcgcctagcgagaacattgaagtctggacagatatgcttcaaaacatgaaatcccgaggcttaaagcaagttgagctttttctttctgatggtgttgttggcatgaaaacagccttggccaggacttatcctaaagctcattttcaacgctgtttggttcatgtcatgcgcaatatctgcgctaaagtacgcgtcgacgatcgtgaaaagatcatgaacgaattcaaacaggtgcatcaacagacaaacaaagaagaagccacagctgtcctgcatgacttctataccaaatggggcaaggtttacagccatgttatcagaagcttgaaagacatagaaccagatctgctggtcttttataactatcccaagcagatcagagcttcaatttattcgactaacatgattgaatcatttaacaatgtgatcaagcgcaaagctaagcctaaggcagagtttccaactgaacagtcgcttgatgcttttattggtattcaggcaatgagctacaatgaccgttatttcaatcgaattcataaaggctttggtcaggttcaggacaccttagaatcctactttgattaaataaataattaaaaaatcaatttacgagaaagaactatttacacaaaagatttgacagtttcggaataatagtattaggcatagcagaagataagaataaacatgaatttagtataactggtgtagacaatgttgaagacattgaaacacaaattttcaatgataataacaatatttcatgccttaatcgacctgtaatccaaaataatgatgttcagatttctttttttcaaaataaaactattattcaagtaataattcatccagaaccctttaatactcgtccaataactgcattcggtaaagcatatattagaactggtgacagagatcgagtagctactaaagagcaacttaaatattttacagttgaaagtcaaagcgagattgatactcacttactaccttcgacctatacaatagaagatctagatgcagaaagtatcaaagaatatcgcaaaataattgaagaaaaaggtattattaatactaattctcaacttagtgatcaagaattcttatattcaattggtgttttcagaaaagatcgattaagtaattcaaatgaatatcatcttacagatggtggtctccttttctttggaaaatatatttcgataacagatcgtttcccacgttttcaattagactatcaacaatataatagcgataattctaccaactggaatgatagagtttctgcaggtgacatgaattatcccactttaaatatcttttctttttataatttagttttagctaaaatagaaacaaatatacgcatggtgctagttaaatcgttttagttaataaaaaagtccaatcttgttagactcgacttgtaaatagtaataatagaaaagagtctgatctgattgaactgtcttaagcttaagcgttttagccaccatttacaagttagttttaaagatttagtgataatttgtcggcactggtatcgtttgtatgcaccggctgagtttactcatcggcgaaatattgatcaaattaaaactacggacagtctgattttggctttacttatctggcaagctaagacaggaattgaatcacaaagaagattctgtgaatgtttcaattgtttatcacactcacgttttaatcggcgttcacgtcagctattgcaattgatttatcagatacggcaagaaatgaataaaaaggttgacctgaatggacatttcttgatcattgacagctttccggtacctgtttgccaaccaattcgcaactatcgtgctaaaatttttcgcggttatgccaacattggttataaggccaccaagaaaatttacttctatggtttcaaagttcatgccattgttagcgatgacggttacattcttgattatgtcgtaacaaaagcatcagttcatgatgccaaggagacagttgaactgctggaaaatgcccatccatctaattactatcttcttggcgacgaaggctatttaggcaaagaactgcatcaacagctaaaacaaatgggttatgaactttggacaccatatcgtaaaaatatgacaggagctaaaaagcacaatgatcatcaattgatggctattcgcagaacaattgaaagcgacttttcgcttctgacctattacaatgccgagaacaatcgagcacgtagtctgataggctttcaaagccggttggaaattgcaattttagcttataatttggcttattgtctagaaagatttaactagcaccacgcgtacaaatatacctgatccatttattcaaggtaatgaccttagtagaacgtcctatcacaacgatctaatcatcgcagctaaggaagccctagtcaattgtttaatgcattcatattatgatggtatggtaggtgtaaaaattgtagatagacctagttactttgaatttacaaaccctggtactatgcgcgtaagtaaagaatcgtttttacgtggacaatattcctccattagaaatactgaaatcgctagtttattcagacgaattggtgtctctgaaactgcagctagcggtggtccaagaattcttaatactgtgttgcaaaataatttaaatgatcctgaaattaacattgattatgaaatcaatactactcgcattcgtatttttaagacttttgcaattgataatcaggaaaaattaactgaaccagagaaatttattatgtcttttgctagcagaaatcctaatttttcaataaatgatattgttaaagatccgcagaatcattttggtaaacaaaccacgattagaaaatatgtaacttaaacttcccacacgcaaaattgcttgtttcattgtgattctgcgtgttttgacaaatataaaaggcacaagtccttttcattgctataattatattgaccaaaacataatttatttgcatgaaaggcttgtgccaatgtctattttaccatctcctgaccaacaaaatgaacaactattttcaaactcaatcatcagcttcatcaagaagtttcaggtgatcaagctgttgagaaaatgtggcttccgcaaggaaaaaggcattagcctgttcagcttgtttctttacgttttaagcaatgtctttcgtgaccgcagcttatatatgcagctgaaaatggatcattttcaagaaaatttttccaagaactcatattaccgttttatgcgcaacgttcacgtcaattggctccacttcaccacacttctgtctgcgcaaatcattaataaccacttgcgatctttgacttcagaaaaacgggctgattgctttgttgtcgatgattcctacttctctaggaccggcttcaagaaaacagaattagtcgccaaagtttttgaccatgtatcaatgacttacaagaaaggttttcgcatgatgaccctgggctggactgatggagcttctttcatgccaatcaattcagtgctgctgtcttctcagaagctacagaatatgattggcgaaaataaagtttttgatcagcgcaccattgctggccaaagacgtatgcttgcccggactaaaggcacagacgtgatggttaatttaatcgaccaagctatgaaagcaggtcatcaagccaagtacgtgctgtttgacagctggttctcaaatccacatcaaatcgtccagctcaagcaaaggaagctggatgtgattgccatggttaaggttagctccaaaatcaaatatgaatttgagggagaacgcaaaaacatcaaacagatttatcgcagctgtaaaaagcgatgcggccgttctcgctacctgctgtcaatcccagtcaaagtcggacgccaggacaaagacggtgctaaaatagatgcacggattgtctgcgttagaaaccgtgccaatcgcaaggattggctggcaatcatttgtaccgacatgtcgcttagcgaagatgaaattatccgcaactacggcaagcgttgggatattgaggtttttttcaaaacttgcaaaagttatctaaaactaagtacggaatatcatggcctgtcttacgatgctttgaccgctcatgttgccatagtttttactcgctacatgcttatgtcagttgccaagcgggacgatgaagatgaacgcacgctaggcgagctgttctattgcatgattgatgagctggcggacattacttttagccattccttgcaattgattactgatgcaatgctggccagcgtaaagcaagtctttcatgccagtgaagcacaaatagctgaattcacggctgactttatcaatcgtttacccaaatacatgcaaaaattgttaaagaaaactagcaaaaataatatagaagcctaaagccaagcaagatcaagagattactggcttatttagtgtgggaagtttaagtatgtaaattcattagtagagaagcatttactatccaatgagaaaattggcaaaaaatatatctacaatttacagaaaaacaatgattatctaaatcgcgttaagcaccttaaacatcttgaagataatttactcaaatagatcattcaaaaagctcaacctacaaaattcatgcagattgagctttttcatcttatttatcttcaaatattctaggcttatcgtcatcaagtgaaacatgcggaatttcggtgttatttgtctcaacttgatccttctcagacaattctgccttcattaactcacttttggctttactagaagtattgcctaaaagtaaagttttctcctgcggcgtattcaccattgcctgtttttctttgaattttttataaacaatcgccgctactgcaccaatagctccagcaacaccgataattgtgccgattaatctcatctttttcatagggatcacctcgtattttgaaatcactttcttattcttaattatatctaattatgaggttgaacacatttttaatgcctattacctaaaactttccgcaatttccggatccatctcatcttctaaaacactgtagccttgatccaaagtcttgatcaatgccatatcctcatcatctagttcaaagtcaaacacatcaaagttttctgctaatctagccttatgaactgacttaggaattactacataatttctttgcaaaaaccatctcagcatcacttgagcagtagtcttatgatgcttttctgcaatcttttgcaagacaggattagtgaaaatgtggttggctccttctgcaaatggtgcccaggcttcaggttgcacgccctctttttccatatattgctgtgatttccattcttgattccagacattagtctcaatctggttcacagccggctttacatcattaaaagtaatcaaatcagctaagcgttcattccaaaaactacttacaccaattgcccgaatgcgtccctctttatataaacgttctaatgctcgccaagtgccatagtaatcgttatatggcttatgaatcagatacaagtcgatataatctaactgcaactttttcattgaatcatcaaaagcttgcaaggtatgatcatagccatacttatcgacccagatcttggaagtgacgaaaatatcctcccgtggaatgctgctatgcacaagtgcatccccaactgcctgttcattgccataaatttgcgcagtatccacaagtcgataacctacttccaagccgttttctacaacttgttgagtttgagctaaatcatcaatttgataaacgccaaagcccaagcgtggcattttgacaccattatttaaaattacatagtctttcatatttcttctcgttttctagttaattattgctatttaattttattttaacatagcccatgaaattcgactttatttcgtgaaacatagatattatttcttaaaattaagcactcaagaaaagcctaaccagcatccctcaacggaattgccagttaggcttcttttatttttcaacttttgcttgataaaatccaaagctcatctgcttcaacattctagtaaaactatcaatgtctagctttttaccggtagtcaaagcttcaaattcaccatcaggatcaaccaatttgcggtcagtcctgtgaaatccatttctttcatagaatttcaggcgactaacacgctgcttataatttttcgccttcttggtaactggctcaatatcaatgacaatttgcttatcagggaatcgatcctctaacatcatcaagatcttggaaccataaccttgtcctcgcaatttttcattaatggctaaataggtcaaatagactgtattatcattctcagcataataagtaatgccgcaaaactgaccatcattataaattgcgtgaaacttaacatttcggtgtaatgacattgctaaaagagaaaacatggagaatctttcccaagctggaaaagccttcatatataacttcttagcgtcacgatatgcttttgtgccccatcgggcgggtttagagtctaaaatagtatccttcttttctaattaaaaattgattgttaataactctgaataatattattatacaaaactttttagctttttggaaactgtcaaatcttttgtgtaaatagttctttctcgcaaattgattttttaattatttattcaaaataagattctaaggtatcctgaacctgaccaaagcctttatgaattcggttgaaatagcggtcattgtagctcattgcctggatgccaataaatgcatcaagcgactgttcagttggaaattctgccttaggcttagctttacgcttgatgacgttgttaaaggattcaatcatattggttgaataaattgaagctctgatttgtttgggataattgtagaagaccagcagatcgggctcaatttccttcaaacctttgatgacattgctataagctttattccatctggcatagaatttgtgcaagacagctgcagcttctttttggcttgtctgttgatgtatctgcttgaattcgttcatgatcttttcgcggtcatccacccggactttagcacagatattgcgcatgacatgaaccaggcagcgttgaaaatgagctttaggataagtcctggccaaggctgttttcatgccaacaacaccatcagaaagaaagagttcaacttgcttcaagcctctggacttcatgttttgaagcatctctgtccagacttcaatgttctcactaggagcaatgcagtagtcaatgacttccttatgtccattaggtttaatgccaatggcaatatatactgcttcacgctcaaacgtttctcggcgcaaaggaaggtatgtcgcatccaaatagacacagaaaaacttgtcgcttagcttgcgcttgtgataagcctcaaccttggggagcatctgcttggaaatatttgatacttgagctggactataatgactgccatacattttctcaatcaagtcagcgatttctctggtagttacgcctttggagtagagcttgataatcgtgctttccaaaacatcagagtgctgcttgtagtcaggcagcgtgtgctgatgaaactgaccgttgcggtctcgaggcacttgcacttcaattggtccaaactgggtatcaaccttgcggaaataagcaccatttctagaattgccagtattccagccatttctggcatagggatcatagcctagaaaggcagtcaactcagcttctagcaagttattaacagcctgttgtagctctttgcgcaataaatcatttattttgtctggattgaatagagcttgagcaaaatctttggtaaaatcattcatgaaggagttcttctttctgtatgtgtttttttgttcaaaccaatcatacaagaaaggaactcctttttctaatgtttaaagaaataaatttaaggaatcattcatccttacacaaactattttacagtctcgctttttgacataatacttatcttccattcaaaatttaagtatgcattaatattatttattttagtaaccagtcaatgacattaacttggctaattccattatcatcataacttcccggatcttcggtaagtaatatcttagggtagttatccttaatctctaaaaaaggtgctatttctctttgataagttttttcattctgaaccgttaaactaacttgatagtattcccgaataccatcgcgaatagcaacaaagtctacttccttttttcctaaatttcccacatacacttcatagccacgtctgattaattcaagatagattatgccctctaatctgttccccatattaggacgcttttgccccaacaacgctcttcttaatgaaggatctaccatataatacttattgttaatttgtaaatactttttaccagcaatatcataacgatcacagcgataaaataaatatgaatctaccaatttttctatatacgccatcactgttgcgcttgtcgctttaacgccattattcgatagcacattcgctaccttagttggagtaattaaattgccattagtatcggtcaaaaaagctgcaatatgttccaacaaggtagtatttcctcgttgcattctagctaagatatccttaaccaagacagtgttaataattccttgaatataagacagataggtattttcatcctctaattcagtagcaaaagggaatcctcctcgctctaaataacgattaaaagcttcttgatgggataactcaggaactgaggctaaaaattctttaaaagaaaagggatatacagggatttcaatatacctaccagccaataaggttgctaattcacctgaaagcataaaagcattcgatccagtgacataaagatcaacattttgcttgataaaaaggctatcaatagctttttcgaaatgagggatgtcttgaatttcatctaagaaaatataattcattttatctggaatcaatcgttgatcaatatattgatacaattttaaataatcagtaattgtagcaagccctaaatcttcaaaatttaaaacttgaatttgttcctgcttaacacctgctttaagtaattgttcctgatatagttttaaaatcgtggacttaccagaccgacgtactcctgttaaaactttaattatttgtttatcacgtagtttattcaatttatcaatgtatttaggccgcggaagcatttttaatcctttcaagttaatgtaattcaaattagtttaattttcacgtcaattttagcatataattcaaattagtttcaatctcttaaaacttctgagatgagttttaatttaatttgaatttactcaaaggcttaccactaaatttaaataaaaagaaagtctgtcaatctcaatgtcattaagttaagacattgacaaattatcgacttggacttttaagatcattcatttgcgatttatcgcatttgaatgatcttttttcatgccaaataaacccaaatcttgtttagaaattaggctacacgatataaataatatacagctgatttgggtttgagatttcttttgtcttttcgtcctggtctgatcggaattgtgtaatgactaatttgaataagaatctttttaaagatttcagttgaagaagaaattatatacatagcctggatgacaaaacatgactgtttgaaattgatcgcatattgatacttgcagtttttttgtggtacatatgcttgagcatcaatttgactgactgcgttaaacataatcatgtgggcatagatctccatttcaataaatctatcctgcttggaatgaaactgtacgctacctaaagcatatttcaactttttgaatgaagtttcaatgccccagcgcaaatggtagatttctttgatcctttttaagggataatcggctctatttagattagttagaacaacttcccattcttctttgcctgatttaggatcattaattctaaatttacaggcacgaaattttattgtacataactctccaaagtcccagctgccatctttggtatttttagaccgatattttatatattgacggtaatgatggttaaccaaatgaacgttttctgtagccttatgggtttcataataataattagaggtagtcacccagcaagctatatccttatcacactcttgattaggcaactcagctacttccttaaatgcgccatatcccgttttagtacgtatgacataataacagttaggcaggcgattacaattttcaatcatgttaaagccggtataacctcgatccatagtaactatatatggtccgcaatttagctttttaagcatttgaacggcggctttacgttcatccatctttgacttaggctgaaagatgcagtcttgataagtattatttaacaggtcatagagtgcattaacatgaatttggcaatatggctttcctttatgattgagatttccaacgatattctctgatttaggattccagatttgattaaaatcagacccatcaatggcaaatatacgatatttatgatcaaataactggatattaaataaattctgattaaatacagttagaatatgcttaaaacatgcgggtgaaagctgacctttgcgttggacataagcggaagtactgactactttatcgttatttttaatagctttttggccaaaagctctaaacaactcactggtcaaatcttttccttgcatattaatagtagttttaatgactgtagctgcatctaaaaaccgcttcctagtgaaggcatgaggatcatcgataaaatcatgaatatgctttccagtatcattgataatttgatcaagacgatctaaaatatttctgtgaagggctttcataattaacaccagctttctggcaataattttgaaggtttaataatttaatcagagggcgaaaaggtaggttcttttcgcctttattttatgcaaaaaaagaaccaaatcataatgattcggttctacagagattagattcaatttgtcaatgtcttaacttaatgacattgctgtcaatctaacaaactttcttttttcataaataatcgttaactacatcaacttatatttcttcatcaattcttcgatataagtgcccttaaccttcttaagcatccctttaatcgcaaacttttcaggcattggcaaatcaagatcagccaacttcttctggtcattcaggtaatacatcgcattcatcaacattctgacatcaaatgcggaagcgaagacttctggtacaccgcggtcaatattaagcaaagtgtagacagcttccattgccgtccgaactgaatactctgtcgtaaagacagtgtctcttggagtttcggcaaagttaccaataaaggctaagttcttagaatgatctggaacaacctttgggcggtcgcctaaagctcttggcataaagtaagaagtaatatatggcatgtgaaccggaattgttgtagctgcggcagctatttcaggaattctttcttccggcacacccatgtgatagagccactcttcacacatttcaagcccattacaatcaggcatcgtcttttccacataattacccttggtatcagagaataaaccatataaccaaacaattaattcatttggtttttgcgccttaaagtgtggctgacggctgattgagtaacctaatagccaattagaatccttaatagtagttggtccactagttacgattgagccactgtgtggatcctttttattaacagcttcaataaatggcacaacatcatcattcttaaaggtaatagttgaagacatccgccagttagcctttggaatatccttgcaaaagacatcaggatggccaaagtcttcatcttgagctgctaagttcttccacaatcgccagcttgcacccaattcatgttctgctggagcgtgatgcagttgatctccataggtagtactctcagtaattgaaccattagtaacgaagactaagtcatttggtgttaagtcaatggtcttcttttcgccatcttcggttaaaataatttgtttagcaaccttttcgccgtcagagcggttaacaaagatattatcaaccaccgtattatagtggaagattacaccacgatcctttaaatacttgaccagcggcaaaatcaatgattcatattggttatacttggtaaaacgcaatgatgaaagattcttcaaggttgctacatgctgtacaaagcgcatcaagtagcggcgcatctccatcgcacttgcccatggttcaaaagcaaacattgttgaccaatataaccagaagttagattcaaagaattccttagtgaagacttcattaatcttcttattttgcaagtctttttcgggagttaaacaaagatcaacaatttccttcactgcctttggtgtcaaaagaagttgcccatcagtcggcaaagcttgaccacgatttacaattactctagttttagcataacttggatcttttctatttaaacgatagaaggaatccaaaatagattcaccttcatggtcaggcgaagggattgatctaaataaatcccacaaacattcaaagtgcggctccatttcacgaccgccacgaatgatgtaactttccttttctttattatagatcccatccattgagccaccaggcagacctaattcttcaaaaatgtgaattttcttgcccttcatttggccatcacgaattaaaaagacagcagtagctaatgcagccaagccactaccaacaatataagcagatttttgatcaacatctttaggtttatcagccttaacaaaggcttcataattgccattactataatgcataattgacacttctttcaataatcgttacacttgtaactatttatgcttataaaataatgtaagcggtatcagttgtcaaacattttacatttggggatgatcttgatgaatatgaagagtctgcatacgcagcaacaaattgaacatgcattattcaaattactacaaaaaaagccttatacggagatctctattgcagaaatcacccgtaaggctaaggtatctcgtacttccttttatcgcaattatgaccaaaaagatgaagtcattgcgcaatttttatttaatcaataccataattttatcgctgatattgatcaacataatttgagaacttttaagcagcagcttactgcctaccttgaattcttcaaagataatcctcaactaatgaaattactgcttgatgcaggatttgaaggagaattacttaattttcaaactaaatatttgaaaaagctgatgtcagtttaccattctgatgtccacctacccgactatgcaatagcctatcaatctggtggaatctatatgctgttagtctggtgggttaagcaaaattatcagaccagcttgactgatttaatcacttatgccgaaaaacacattatgctgtaactaaaaaagaagagctcacaaatcgagcttttattttcaaaattattacaatttcttgcattttttaccaaagttaaagtagaaattcattacaaaggcgataattaacaaaatcaatgaaaccaacataatttccttaataccgccgtggaaaatagttctcattgttggcactaagttttgcggcaaactcttggcactttgcgcatcactcaatttattcatcatggtcatcgtgattcccttgtgcgtttgaactccgctggcccagttcagattcataattacgccataaacagcagccattactgtttgagctaaaattctgatcaaatatgaagttgaagtggccgttgccatattctttagtcccgcatcaagttgtacctttaattgcaaagcaacaaagataaagccaaccccaatgccagaaaatgcaccaataaaggtcaacatctgcacaggcgtatgtatgccagaaataaacaaaccagctgatgagataatcatggcaactattccaatcaaaactaatttaaaggttgtcatatgctcctgaatcgctgctacactttgagatgcgataatttcaacaatcgaatttggaattaacgtcatcccaccaattaaagctgacaagcctagtaatgcctgagcccacattggcatataggtgtttactgctaaaaaggcaccccaagtaaaggcaaataataaaaagtcgccatctaaatctttatttttaaataaagaaattggaataattggattgtctgcatgaccttcgcgaataaagaaaaagacgatgaagactaaactaattataatcaatccaattatgatccagctagcggttaaaccaactagttgcacgcccatcaagaataaaagcagtccgattactaataaagtagcaccagggatatcgaaaaccggtgtcttttttggagtaaccggtttgtagtaaattaaacaaatcaaaaatgcaattaagccaattggaatattgatatagaagacccagtgccaagagaaagcatcaattaaccaaccaccaacaagtggccctaagatcgcagccccattccagctggcagttaaatagcctaatactttggttctcgttttaatatttttaaacacataaccagcaatgatataaggtaaagaacccataccacctgcaccgattcccatgataaagcgagagcacagaaagaaaataatatttggcgctatcccttgtagagccgatcccaaaacaaagagtagcaatgaaagctcaaaggctcgtttgttagtgattttctctccgatcttggtccaaatcggaatcgaaatcgacattcctaataagaaaattgccacaatccaacccatgaattgaattccgtgcaaggccgcgacgatggctggaatagcggtattaataatagttccgtctagccccgacatcacgttgccaagcatcaaggctgccgtcaccattgtaatctgttttttattcatgcttaacttctttctatggtatgtaaaaagcgttagacaaaaatttctaacgcttttgagtaaaaaaatatggaggatacagggctcgaacctgtgacctcctgcttgtaaggcagatgctctcccagctgagctaatcctccattatggggcggaatgtgggaatcgaacccacgcatgctggatccacaaaccagtgtgttaaccccttcaccaattccgccatcaacggtccatatgggatttgaacccatgatctcctccgtgacagggaggcgagataaaccactgctccaatggaccaaactagaggaggatgtgggatttgaacccacgcgcggcagaaccgcctaacggttttcaaaaccgtccccttaagccacttgggtaatcctccatagccgaacagatactagtataccaaagtgagaagataacgcaagaccttttttaaaaaaaagcaaaaaaataaagcctttcggcttcattaactatgtaaatttttctggaacagcaaatacttatattctttgccagcaatttcaataaaacgttgggtagcaatattacgccagccaaagtgcttaaagaattcttgtgcatctttatcttcagccagacaccacaagtaaatcttgccatagcccatcttcttcagttcattttctgcggcatttagcaaggtcttacctacattgtagccttgaaaatcaggtttaacatataatgccatcaactcaccgcagccaagcattctagtgtcacgtggacgaccatagctaacggctgcttgaacctcgttattatcgtctttaaaaactaaattatgacgaccactctcattgagtcgttttacccaagcagtagccggaatattatccaaaaatacatctggtagcacgcctttatacgtctcttgccaagttgtttggaaaagcttacttgtttgttttgcttcgtcttcactaattaatggtttaataatcatatttacttcttctttgtcaaaacagtcacagcctctacatgtggcgtttgtgggaacatatcaacaggatcgattcgcttaaattcataaccttgttcttggaacaaaagcaagtcgcgaatcattgttgcaggattgcacgaaatataaacgaccttcttaggtccagtcttaactgtcgcattaataaattcaggtgtcaacccttttctcggtggatcaacaaaaaccacatcggtcttcataccctttttagcccaacgcggcattatttcttcagccttgcctaagtaatactttgcgttttcaataccatttagctcggcattgtccttggcatccttgatcgcatcccggacaacttcgattccacgcacggccttcacatgcttagctacactcaaaccaatcgttccaattcccgaatatgcatcaattactacatcatccgaacctaaatctgcttgcttaatcgctaaatcatacaagcgcggtgtttgcagcgaattaatctggaagaaactttgaggtgaaattctaaactttaaatcaccaatttgatcagtaatctggtcattaccgaaaactaggtaatcctttttacccaaaatcacattggtcttcttaggattatagttcaagactaaacctgaaaccttaggaatctggctaatctcagctgcaacacccatcatttgtgggaaatccttaacccggctgaccaaaatgaccattatctcgccattagccttactacgacgcacatcaagatagcgtataattcccgtattgtttacctcgtcataaggcgcaatcttgtacttgcgcaacacatcacgcactgcaaccaatacacgatcaatttccggatcagtggtaaagaaatttgtcaaaggcactaaatcatgtgaatgtcgtctaaaaaagccaatctcaagctgtccattatattctcgcacaggaacttgggccttgttgcgataccctgtttgctcaggactaggcaaagtttgtcctacttcaatctcatctaaatgtgccttcttaagtaagttaacaacttgattacgcttgaattcaagttgcttatcatacttgatatgagctaaagaagcgagtcccgtttgaacccattgattcaacttgatcttaactcgatcaggactttctttttttatttcttcaattttagccaaagcaaagttcttcttaacctttaaaatctttgcactaaccacttcacctggaagtgcattagtaacaaatacggtcattccctcgtaatgggccacacccattgcttcatacgaaagatcggtaatttctaaatctataatttgattctttttcatactcactcaaccttaaaaaaatagctctctattattataatacttgaccaatctttgtgcttcaaaaaataatcgactgctttttagaaccaactatcacccatatacgcatgcaaaatgtggttagccgctactttcaacctcaaataattaatattattagaaaatagcataatcatacgcttggtcttgtaattcgcaacaaagcagcaattataaccagggatactgccattagcgcgaatgatgtcaccattaaaatacactccaccaaaataagctaccgtctgatgctgggcttggtggtaatactcgtttaccattttaggatttttcagcacatcgttatatacaaacttccaataatcaattggtgacatgaataagttccctgctccaaagtccgacgacgtcgtcactgtcacttggtgccagtcaacatttttactcattggctgagggatctcgttttggttaacctcagaaaaatccttaactttctggagcttaagtggcttagcaaaatcggtctgaatataagcattataacttaaattagtttgtttgctaataatagctgctagcaattcataatcaacatcttggtaatcccaagtatgaagatgatcattctccatgtgattaagcatataagctatttgctctttctgatttttaagcggagaagatggtcgagcattgttaaccaagccactagtatgattcatcagctcacgaattgtaatatctttactacctgaaacttgaggataatagttagataaagaggtattccaacctaataacttttcttgttgcagctgataaattgcagttcctgtcataattttttgtagcgaagcaatcggaaacaattgattagcgttaactatttggcttgaatcagtggtctccttattttggacaacaatcggttgcccctttttatcattaattaacattacaccgttgatatgatgaaacttcatataatcatgcagctgttctttctgattcttaatgccattatccagcttatcccctggctgcacaatgaataaaaatattgcaaaggcacaaagtgccaaaaagatggataaagctcgttttttatgcataaagattcctcttaattactatcccaagcaatgtaataactatatttcctcaattgtaaatctagtatctaaatagattcaactattgtgtgattttatgcaatgaaaaaacatgcttcattagaaacatgttttttcaagtcattttaataaaaacatgaacagcataattaccgcaataaatttcactgctcttatttcatgcactatactaaaaatagcttttctataaatacgtcacattcaaaaagattttgcttaaatctattgacagatatttttaatcttgctatcatattgctcaacaagaaacgaaaagtagcaactttgctcagcgttcagagaactggtggtagctgcaaaccaggcaggcaaagcttgacgaaatacatcgttataatgttgttcggaaaaattcagaaccgttaccatctgatagagattcaagttcttatgcttgaaagagtgggtggtaccacggctattgtcgtcccgttgactaataagtcaacgggattttttatttggaggaatataaaaatgaagaaaaagaaagtttcctttactgaatcaattattatcttaattgcactcctcactattctgggattggcagttatcaagcttgccctttctccagaagtgccagttttattcattgtccttttacttaccttttgggctagactgcgtggcttttcctggcaagatgttcaagatggcatcaaagaaggaattagtgtagccattattccgatttttatctttattttaatcggcgctttgatcgggatctggattaaagcgggaattatcccttccatcatggtcctgggtttccacttaatcagtggtagtttcttcgttccatctgtttttattgtttgttcaattattgggatggcaatcggtagtggttttaccacaatctcaactgttgggattgcgctttttgggatcggaactagtatgaaccttaatcctgccttagttgctggggcaattatctctggagctgtttttggcgataagatgtctcctttatccgattcaaccaacctttcttcagcagttgccgaaagtgaattattcgcccacattaaaaatatgatgtggtcaaccattcctgcttttgtagtttcattaattttattctggatcttaggcaacagtggcaacatggatccaactaagattgaacgtacttcacatattttacaaactaacttcagtatcagctggtgggcaattgtcccaattatcttgatgatcttttgtgcttggcgcaaaatttccgcaatccctacgctctttttaaacattgcgattactgtaatcatgatttttattcaaagtccccacgaatctattcaatcgcttaacaatttagttatgaacggctttgtggctaaaactagtgatgcttctgttaatgccttattaacccgtggtggtatttccaacatgatggctacagtagctttgatcatttctaccttatctttgggtgggatgctcatgaagttcaacattgttcaaagtgcaatggaaccactcgttaaacatttaaccaagcctggtcgtttaattacggtcaccattttatctggtatctgtatcaacctttttgttggtgaacaatacctatcagttatcttacctggtcgtgcatttaagccggcttttgataaaattaagctttcaccattagcccttagccgcgtacttgaagacggcggtagcgtaattaactacttaattccctggggtgttgccggttcattcgccgcttcaactttaggtgtgccagttttacatttcttaccattcgtcttcttcagtcttctttcaccaatcttctctattttgagcggaatcaccggaatcggcttgaagtgggctaaagaaaagtagaaaataatcatatcagtaaaaaagttcctaagaccatcgtctttaggaacttttttacgcaatctactagctaacggttgtgtcatgttgcaaccaattattactcttttcttgacattaccattcgatcattcacagcagctctttttggtatcactttataacctcgtcaaattcacttcaccagccttcatttttgggattgtctttaccgtaattaggaaaaatgaccagcaggcaaaattacctttaaaatcatatttttccgaccagtgggataataacttctttcctacttttgcttggactttattttatctcattgctatgcctaatctgcagcaacacgggcattttcacaatattgccacattcatctggcaattcttcagtgataatgccacacctcatctttggtacagcgtcatgatgctgcaatttttgcttatcatgcctggaatcaaatcagtctgcaactgggtccagcattcttatcgacgactactaatcgcagttattagttccggaattatttactttgcctggttaattttttatgatcacttcattttaaatggtcccgaggctacccattggtatttattagatcgtatctttatcagctttttgatctttgggctctacggtggcttaagctggaattttcatcatgaaattcaaacttttctgtttacatattggtggctaattgtgggattttaccttttaacctattttgggaccagagatttatttttagccactttcaaattaacagacctaaccaacgacagttattacctaccttcaatggcaatttatgctttagcggttatcctcttgatttacctaatctgtattgcacaaaaagtctttaatatgaactactggctaaaatcaattcactttctagctttttatgcttatcgagcatttttagccaatgttttttgggatcgtatcttttggcaatattttaattttaaacagctagctttacaaaatatttatttagctgtcttactactttggatttgtacatggtgtgcttcatatttatctgtttatgtagttcaccacctttggcttaaaattaatggttctgtcggtccatcctaatttgcgcacgtcgatattcctgactgtcacgcgtaggttgagcaactatatctgtaattattatttcatgatcatttcgttcaaagacgattgcttggtctaattccgcatttacttttttattgatagtggtatcttgattaaattttaaatcatccagctcccgatcaataaatgttttttgcgaactcgtcagctgatgatatttttctgccgcttctggagtaaaggacaagatcgtctcccgtctgaattcacctattttatctggatattcacttctttgaccacggatgtcattgtcaatatatcttttttccatcaaaatcacttcctttatatcttcactatacaggaggcgattttctttagacatctttctgcctactttagttttttcataagaaaaactttactattattcatttgaccactaaatacggtaaaatagataagacaagtaaataaaaggagtgtatatttcatggataacttttcaaatactccaggacggcgtcaagtccaggatatttctgcagttaacagcttcttgactaagatgtacagtctcatgattttggctgttttagtttctgcagcaactgcattcttgactacgactgtgtttgcatctgcaattgctaacatgtcacaagccgtttactggatcatcgtatttgttccaattgttttatgtatgacaatcagctttaaggcagcaaagaacccaacattaggcatcgttcttctgttgattctttccgcagtctacggcttcgaatttgcctttatcgcaggagcatttacttccgcttcaatcgctggtgcctttttatcagcagctggcgtgttcgcagcaatggccgtcttcggttctgtaactaagcgcgacttgagcaactggggttcataccttggcgcagctttgatcgggttcttagttgcatggctcgttaacgccttcttcattagaagtggcgcttcaacctttatcttctcctgcatcggtgtgttaatcttcactggcttaactgcctacgacgcacacaatgctaagaagattttcatgacctacggcggtcaagtttcagatactggtttagccgttatgggggctttaagcatgtatctcgacttcatcaacatcttcatgttcttgctacaaatctttggcatgggcggagatcgcgattaattaatttccatacaaacatagcgttgattagcttttacactagtcaacgctatttgttttgcttaaattttatccaccaacataaaattcgatatgttgttgtaaattgttgaattcaactggacaataaccaccaatttcgccatcaaggttaactggcaaatcttgtccttcacttttaccaatcaattccgccttcaagctgcgggtcttggtataaatgatatttggatcatcaacgtgcttaccattcaaagccaatgccatcaacttcatcatgctaacagggtcagaaggcttgaccacgatcaattggaataatccatcactaagctgtgcatcaggcataacttgctcaaaaccaccaattgaattagtcattcctagtaggaacattgataattttccttcataaacgccatcatcataagtcaaacgcatctcattctcagtcaagtgtggcaacatttctgcccccttgattaagtatgcggcataacccaaagctgacttaacctcagatggtacgccatatgttaactcagttaaagaaccgctggcagcaatattaacaaaatattgaacctggtcaccaaaaacagctttaccgatatccattttacgagttttattctttaagattactttagcagcatctggaatattatcacgtggaatggctaatgcacgagcataatcattagtagtaccagcaggaataattgccattttaggcctgttttctaaaaaggcaatcccgttaactacttcattgattgtaccgtccccgccagctgctacgattaaatcaaaaccttccttagcagcacgagtagcttcattgcgagcactattttctttaggtgtagttctaaaagcactagcttcgtagcctgcttgttctaatacatctaaaatatcggccacattctttggcatctgttcgtgacctgatacaggattataaattaatcttgcttttctagtcataattactacctaacgttctaaaaattaacgactttgcaattcttggttaagtaacttgttaaccatcttagggttagccttaccacgagtttgcttcatgatttgaccaactaagaagccgattgcacgatccttaccattcttaaagtcttcaactgattgagggttatcatcaacaaccttcttaaccattggagctaaaacagaagtatctgacaattgaaccataccattatcttcaacatacttcttaggatcagtaccattttcaatggtttcagcgaagaccttcttagcaatcttagatgaaatagtaccatccttaattaacttgatcatttctgccaagtgttcaggcgttaacttaatatccttcaattcaacacggtgatcgttcaagtaaccattaacttgtgtgttcatccagttagctgccagagttggatctgcacctgccgcaacagcttcatcaaagaagtcagaactttccttagtttgaagcaaaacgttagcgtcatatggcttcaaaccatatttatttacatagtcatcgtaacgagcaaatggcccctttggtaattccttagcaatttcatcgatccattcttgtgaaatatgatctggtgcaatatctggttctgggaagtaacggtaatccgatgcaccttccttaacacgttccaaaacagtcttaccagttgcttcatcaaaacgacgagttgaaagttggatgtgaccaccagccaaaagaacttgttcttgacgcttttcttcatatgcaagtgaacgacgtacgtgatcaaatgagttcaagttcttcatttcaaccttagtaccaagttccttttgacctgcaggacggatagaaatgttggtatcaacacgcattgaaccttcttccatcttaacgtctgaagcaccagtaaattgaacaatcttacgtaatttttcaaggtatgcgtaagcttcttcggggtcttccatgtcaggttcagaaacaacttcaagcagtggaacaccttgacggttcaagtcaacgtatgagaaaccgttggttccgtgagtgttcttaccggcatcttcttcgatgtgcatttcgtggataccgattctcttcttcttaccgcgaacttcaacttcgatgtaaccatcacgagcaagtggttggaagaactgagtaatctggtaagccttggggttatcaggatagaagtagttcttacgatcaaaatgagtagttggcaaaatgtgagcgtgggttgctaaggcaaccataatacctaaacggtaaacattcttgttaaccattggcaaggtaccaggcatagcccagtcaataacattagtctccgtgttttgttcagcaccataggttactggtgaaggagagaaaatcttgctctttgtctttaattcgaagtggacttcaagtccgatagtcgatttaaaattcattcaattagtcctccattccagttggtgttttttcataaaacttgttagtgcgttcgataaagtcagcagtcttgaagacattaccttcatcaaaacgcttagccataacttgtaaaccgacaggcatcccatcaactaaaccagctggaacactagctgcaggaatacctgctaagttggcagaaatagttaaaatatcattgttgtacatcttaattgggtctgaaacttcttcgccaataccaaatgctggctcagtagtagttggtccaacaattacatcattttctgcaaagatcttgtcaaagtcatcacagatcaaggttctaaccttagcagcttgtctaaagaaacggtcatatgaaccagctgaaagggcaaatgaaccaagcataattctacgcttaacttcagcaccaaagccttcagaacgtgatttaacgtaaacatcaagtaagttcttagtgtccttagcacggtagccgtaacgaataccatcgtatctttgcaagtttgaagaagcttcacttgaagcaatgatgtagtagtcaggaacaacgtatttagtatgtggcaatgaaacctcattgatcactgcaccagcatccttcaaagcatcgatttgcttttgaataacttcacgcatttcgccgctaactgcttccatgtattccttaggaacagctacacggagacccttaacatcttgaccgataaacttggtaaagtcaggtacttcacgggttgaaacagttgagtcatgctcatctgcaccagcaattacgtttaatacttcagctgaatccttaacgcgcttagtcattacaccaatttgatcaagtgaagaaccaaatgcgataagaccccaacgtgatacacgaccgtaagttggcttaataccaaaaataccgttaaatgcggctggttgacgaattgaaccaccagtatctgaaccaagtgctgctacaacttgaccactagcaactgcagctgctgaaccaccagatgaaccaccaggaactttatctaaattccatgggttgtgagtagcaccataatatgagtgttcagttgatgaacccatggcaaattcatccatgttggttttacctacaaaggttgcaccagcttttttaagcttagaaataactgttgcatcatacattggcatgtagttgtacaaaatgtgactagcagcagttgtcttaatcccgttagtgatgatgttatccttaattgcgattggaatacctgctaacttactcttggagtagtcaaggttatctgcaggcttagcatcatctaaaacagtgatccaagcatttaacttcttatctgtatccttaatgtttgccacagtgtctttagctaacttatctgctgacaagtcaccgctggcaagctttttgtttaatgaatcaatattttcgtttaagtaattcattactcgtcctcatccttattaataattacaggaaccttaatgtagccgtttgccttttcaggaacgttagccatcaatgtttctctgtcttgtccttgccagtgttcaggtttatcttctctgaagacagtatcacgatcaacaacttgaactgtttcatcaacaccctcagtatcaacttcactaagttgatcagccatattgataattgatcccatttgatcagtaaatttatctaattcttcttcattaaacgcaagtcgcgaaagagtcgcaacgtgtttaatggtatcttttgtgatttccacgcaaatacctcctattcgccgccataaacatggacttgataatcactatcgccggtttcttttgcaactaaagcttgtacatcatctactgaaccaattttgatttcaattgggatattgccagacaagtactttttagctgacgacaaaaccaaacgggtaaaactttgaatttgttcatagccataaaattgcgttgttacggaaatgttttcttgtgaaagcttaccgtttgtataacgcaaagttgccgttaccccactaatattagggaagtagttttgaatagccgtcttgaaatcattgaagtgcgatgcatcatcactgttaattgctttttcactaccagttgtcggtaaaacttgcattttttccgacatggatttccatttagatattttactactattagcggccgctgtcccgtaagcgaagtaagttccaccaactaatgaatcttttccagtcttggagaataaaccaatcgtaatcggaatattctttaaagctttcttcttacgcaagcgagcaacaatttcattagctattttttcaccttgagctttttgttcagcacgtgaaatagtagtttgaaattctgcaccgttacgctttttctgataataatcaaccgaattcatggctaagcccaagctcataccacctaaattatacttggaaccagatccagtcaaataatcttgttcgataatttcttccaaataaattggattacgcgtatcggttccggtcttaccattatttactgggtttaaaccatcaggatttgatttggatttacgcattaaccaatcagttacagttgaggtatccaaatattgtccttcttggaagacgtattgattaggcgaaaattgattcttagaaatttgaatcagccctcgctctaattcacgcgtatcaacagaattatcattatcagtagctgttaatcctgcaatcggactaatattatagcgaccatttttcattaaaacggtatagccattcgttcccgtgttagtagtttgatagctttttttcttagtggttgaagtggttgtcgcattatttgctaaactagaatccttcaacttaccacaaccacttagagtaagcgcgattccagctaaagccattacttgcaaatattttttcacaataattgtcctttattcaatttgtgcaattgcttcttcttcagtcaaaagtggtacgcctaaagtctgcgctttagtatacttagaaccagcatctttgccataaatcacgtaatcggtcttatgcgaaactgaacccgtaactttggcacctaaagcttgtaattttttcgtaaactcacttctagtataatgctctaatttacctgttagcactacagtcttatccttaaatggattatcttcaatttctgcaggctcatctgcacctaagtaatccatattcaggccgctctcacgcagctcatcaattaccttctgtgcttctggttgagcaaaatatgttgtcattgattccgcgatcgtcatgcctattgtatcgatagaagctatttcttgcacgtctagagacataatctttgccagatttttaaacttttgagcaattaagcgtgctgctttggccccaacatggtcaattcccaatccagtaatcaataattcaactgagttttgctttgaattgtctaaggcagttaacaaattattgatcgatttttccttaaaatgatcgagttgtgctaaatcatctgcagttaagtgataaagatcagccacattatgcactaaatctttagcaatcaattgtttaacgatctttggccccaaaccggcaatgttcatagctggtcgagaagcaaagtgcgtaataccctcctcaacttgagctggacaagatggattgatgcagcgcaaagctacttcatcttctaggtgaactaatttttgcccacaggatggacaagtcgttggaatctgataagctacagaatctgccggtcttttagccatgacgacttcagagatttctggaataatatcgcctgctttatgcagtttaacggtatcaccaatcctgacgcccttttcattcaaataatctgggttgtgcaatgaagccctagctacagttgtaccagctagttgcaccggatccatgaccgcagttggagtaactactccggtacggccgacagtccaaacgatatcccgcactacagtttcttgttcttcaggtggaaatttataagcaatttcccagcgaggcaccttaacagtgttaccgagctcttgttcaattcctagatcatcaatttttaacacaatgccatcaataccatatgttaggctgtttcgtttagctgtgtattcatcgataaaggcaaaaacttcatctaatgtttttaacttacgaccggtttcattggtatgaaagcctaaatcatgcattttttgaattgcttggtgctgactagtaatttcttcaggcggattaacccaagtataaataaaggtactaagttgacgcttcttggtaactttaggatcaagttgacgcaaagaacccgctgcagcattacgtggattagcaaaaactactagaccttgctcttctctttctgcattcaacttggcaaaggcttccttgcccatgtaacattcaccgcgcacttcagttgttaacggttcaggcaaagtctgtggaatatcactaatatacttagcattagctgttacatcttcaccaacataaccgttaccccgcgttgaggcacgaaccaacttaccattttcatattcaagcgatagtgataagccatcgatctttaattccacgttatattcaactggatgaccaactaatttttgcatccgttgatcaaaatccttcagttcagctttggaaaagacgtcccccattgacagcattggaatcgggtgctctaccttggtaaaatcactatcaatctgtcccccaactctttgggtaatggagtcgggtgtcacaatctctggaaattctttttctaattcaagcaagcggttgtagctttggtcgtaaacattgtcttcaacctcaggcgcgtccttagagtaataggcctcagcccattcattaagctgttttctaagtgaagccgcttcttttttagcttcatcaagagtaatttctgccatttttccctcctgatccaaatcaatctttctttaattatatcttcttaattggcgcaaaggcagccaaaagccgtttgattcctttaccagggaaagcaatatccagctccatatcttcaccagtgccattaactttagttacaacaccatgtccccaagctttatgctcgacttggtcgcctacattccagcccttcttttcagcaccgacagcgcctgaagctttcttagcagtataaacttcagcgcgagctcgttcggctttgcgagcaaatggtgccgtctgtttctcaaagctagattggataaagctgctttgtaatttttcattttcttctttgtgcagatcctgttcatcaatttcgtccaagaatcttgaaggcggattattttgcattctgccatacatcatccgtgagtaagcattagttaaaaacagttcttgcttagcccgagtaattcccacgtaagctaggcgccgctcttcttctaattcattgtcatccatcattgcacgttgcaacgggaaaagcccatcttccatgccaattaagaaaaccactgggaattctagtcccttagctgcatgtaaagtcattaaagctacttgattgtcatcttcatcaagatcatcttgatcgctaagtagagatacttcagccaagaagtcgcttaatggattagactcatcttcttcgggctcataatgatcatcaaaacgcttagtaactgacaagaattcatccaagttttctaaacgcgtttctgattcaattgtattttcagctcgcaaggcatcggtataatcaaaatcagctaagattttttcggttaaaccggttactgtaccattttgagcataagcaattgcatcacgtaatttagtaccaaaatcgcttaatttcttggctgctctagtattaattgaactttcagccacatgtcccatcgcatccaaaatgttgtagtgattctcatccgcaaatgttaacaacttatccacagtagcggcaccaattccccgctttggagtattaataattcggttcatactcatcgtatcagctggattagcaactaacttcaagtaagccatcacatctttaatttctttgcggtcatagaatttatgtccaccaacgatttgataaggaatattgcttttaacgaaagcttcttcgactgttctagactgagcattagtccgataaagaattgcgaaatctttgtaagcccgttttttatctttaacttcttcttggatctttgaaatgatgtagtgagcttcatcatcaccgctttgggcttgatagtaggttaccttttgcccatcaccttgatcagtccacaagttcttagccttccggttctggttatttttgatgaccgagttagctgcggacaaaatgtgaccagtagaccggtaattttgttctagcttcacagtcttaacatcatatttcttgtaatcctgctcaaaattcatgatgttttccatattagcaccgcgccagccatagattgactgatcggcatccccaactacacaaatattcttgtattgtgcagccaaagcatgacagagttcatattgagcctggttagtatcctgatactcgtcaactaaaagataacggaacttgttttgataatagtgcaaaacttcgctatcttttttaaacaaaactagggtctgcataatcaaatcatcaaagtccataatttgatcacggcgcaatctacgttgatattcttcatacaccttagccgccatcttctcaaatggtgacaatgcactctgcataaaagcttcaggatccagcaagtcattcttgccattagaaatcgcggctaaaataccgcgtggatcatacatcttaggattgatattcaagtctttttcaatatgcttaaccaaagttaattgctcggccgaatcagcaattgaaaaattatgaccataaccaatcttatctgcatcccgacgcaagatccgcacacacaaagcgtggaaagtcgacatccaaatgtcgttagctgctggtcccagcaacttttgttcacgctcacgcatttcactagccgccttattggtgaaggtaatggctaaaatattccaaggtgcaacatgattttcttcaactaaataggcaattcgtctcgttaaaacagaagtcttacctgaacccgcaccagcaacgactaataaaggtccttcagtggtttctaccgcttctttttgttgcggattcagaccagctaagatagatttttcgctcattattttccccttcactaaaaattatttcattaatgcaacttgaatattataccaaaaaagcagcgactaattcgctgctttagatttacttatcatatttttcaagatcaaactgttcaatcaaattaatcagcttatcggcatagtccggatcagtcgcatagccgtcggtaaccaaggctttagcttgtgtcttataatctttggatgctagaacatgcttatactgatcgtggttccacgttgtcccattctggaataatctagcgtgagcccgaatagaagcctcatatgagtcatatatttggaaacgcgccttcacggtaacccacttattctttacatattccttagttgtcatcactgccgaagtgttcgggttggatcctttaacaccaaaaagattgttgtatttttgcgacaaatcactttgtccataattactttctaggcaggcttgagcaatcgtgatgcttggcaataagtcatacgacttgtccacttcgcgcgcaatcggaccaatttttttgataaagtcttttttctgttttaatagttttgctgcttcctgttctttttgcagctgtgcttgttgaatctgctctgattgaatcgcgtaacgcctataatatctaaagccgacaaaagcaaccatcagaataaatagaattacgaatacacgcacaacggttttgacactttttggtactcttgatttacgttttcttgccatagttttattccctttaattactaattaaagtataaccgatttttgagtaaaaaaaaagaagtcgctcactgcgactcctcaatcagtgcgggcgagaagactcgaacttccacgatctaaagcgatcacaagatccttagtcttgcgcgtctgccattccgccacgcccgcggcacatcaactataatagcctaaatacagttgagatgcaagaaaaaatataaattattttaaatttctgatcattttacgcaaaagtttgcgctaaacgcaggtgtcccctacatttaccacaacgatacttttgtgtattaatcctgcgcattcttgggtatctcaacccacagttttcacaaagatataggtaacgatattttttctttttacgtaagccaatatcaggtgcataacgactgcctccaacttttttcagcaagattttaaaattgcgatcacggtgtcggtaacccaagcccaataaatgcaaatgatagtgggttaattcatgcttaatgattcctactagataatcatgatattgtggtactaaaaaatgcgcgttgatttcaagatggtgatcatccaaatgataacgcccacctgttgtggtcattcgccgattaatttttacaaggtgcttaaaagggcgatcaaaatattttaacgaaattttttcaactaaattttgtaattcattctcattcatggataaaattttattccaaaaataaaaatcagcaagaatttaatctcgctgattttttgctacctaaatatcttggcatacatccccgcctgcttaggcgtactaatgtgtcgtttcaagaaagttactaagtcatgtttgaatgactttttaccatccatccaggttccagtgaataagtgaatcgatttggagtccttagaaggattacacagaactccatctgaatagacatgaatgccatcttttaacacttgctcctgattacctagctttaagccatacttatttaccagcatttcagtaacggaaatactatttactcccgccatctgattcttagtgtcatattcaaaatcacgatcttgataataatccaaaatatcctgcataaatgggtggcctttttctgcaccaaaaattgcagctgacagataatcatggttttcaaaaccaataaaggcagaagcattcaaaagactatctaacttatccacgactctaacatcagtatctaaatatatcccaccttgttcataaatagcccgtgctcgaacatagtctgacacgaaggcccatttttttgcagcataagcttgttcaatataacgattctcatgcatatcaaaattatcttcattccactcaataatttgataatcaggcaattttttcttccaggttgcaatacattcttcaattatcggggatttaggattgtgtcctacccaaacataatgaatttttttaggaatcatttttaacctcgcttcaaaaagttcttaattagcttcacaatatcatcattaaaatcaagcttgaacaagaacatcaatgtcagataaataattaacatgacaattgacttaaaagccatatcgaaaaaggcagatggaattatattaggcataaacattccaatagccaaggttagcaccgcaattaacaaatacttgggcacgtcatggaaaacataactaaattcatagccatcacgtacaacccagagccgcaaaattaaaactactgcttcagtaattaatattgcaatcatagccccacctgcgccatatggcctatctaagagataactcaagacaatttctaaaattgccccaataactactggcacagcataatccttgtctcgctggttagccaaagcaaattggttagcaaataccccgccagtcggaatcatgataattgttaaggtaaaccaaaacattaatggagtcatcggaacatatttattcccaaagaaaaatggtacaaactgtttggtatttgccataataattacggcgaacaaggtacccagcattacagtagcttccagtgattttttcatcactatcttttgtgccttttttccttcgctcgccatcttaggcataatgactagcgaaatactggtaattacacccagaatcatatttgaaattcgttgtgaattgtcataaaaagaaacctgagtcgaattagaaaaccaacccaaaattggtttatccagcgaagtataaatttgagtcgcaatctgtggaatcatcaaagtaccaattgcaattgccgtctgtttaaatttgtaaaaatgagcaatgggttttcctacatagcgccaaatatcaaaccaaaagacaaaggaacctagcattgtcgacactgacatgatcaataaatatttccacaagtcagcgggtgattttacccataataaaattagaaccacactaactaactttaccgccgtgtttttcaaaacaacacgaccaaagtcagctagtccttgaaagaaccatgaaatatcaacctgtgctgagatcaagtatggcaccatcaacaagatataaaaccaatattgaacgtgaaatacagtcgctacaaaaaccgtgactaaaatggtgataataccggcgattccttggaaataccataacccccagaaagcattggttagctcctgcggtgtaccataagtgcgcgtccgtgaaattgttcgcatccctacatacgacacagacagaatacaaaaaatcatcaagaattgcaccgtattgttcacactgctataaatcccataagtcttaggacctaagacacgcgataaatacggtacagtaatcagtggcaccaatacaataaaaatctgataaaccgcattatataagatgtttaaaaatgttttacgcattttaacctcgatattcctgcgtcatgtacttaaagacgttctcacaatatgaatcaccatgcacctggttagtcaaatgtagccagtaaagacggcgattagcaatctgctggttatcaagttgatccagattgcgaattagttcatcctctgaattaacacagattccgggagtaatctcagcatatggtcccattagtaatccgcgcgttttttcatattgctctaaaaagttagtcacaaacacaatcggtttgttcaagtgcaagtaatcaaagtagattgacgaaaagtctgtcatcaagaaatcagtatcaccgagcaattcgtacaaatcataattgtggtcaaacaagtaatcattgttcatgaaagcaatgttagaataactgctcttgaaattggcaaataaacgcatttcatagggatgcaattttacaatcagatattgatgccgcttctttaattctgtatttaatttttcaacatcaaaatcccgaaaggcaaaaaagtttctctctttgattttctccataatggatttatcttccaattcataacgaaaagttggcatatagatcccgatctgtgcctgatcgtcctcagttttaaataagtcagccaacaattgtttcttcgaaattaccggcttagccaataaatccaaacgcggaaagcccagcttgcggtatttttttgtctcaattgccatacaagcactcattagtgattcatatagatcagagctagaagcaacaatatccgcattcttgtgccacaatttttcgttacggcgattgtcgcgtcgcttagtattattagccataattcccatgcgcttgagtggaacgccatgccacaactggacattaatttgatgcttgcgcaccttaaatggttggtgcgttgtaattacatatcgcgctgctccgattttctgccaggttttccacttcaagtgtgacgatggccacggctcaactaatgtaacgttatattcaggatgattcaattgcagccacttgtaaaaagcatagccgttagatccagacctacctgaaccattcaggataaccacattattgttttccatcgtggtaaatctagccaaaaaactcatccaagccaaataaagacggaataaaaagcttttcattaaaatacttccttaaaatagtctaatacctaaagcatataaaaaaagcttgagcaaactcaagcttttttctttatttttgttaaactttattctttacccatttttctctggcagaatttaacaatttcaacaatcaaaaccatcaaaattccggcaattaaaatgactaaccactgtggtccatcaagttcagtcacatcaaagaacttagtcataaatggcaattctaccgctgccataattacagcagcaatgataattgcaccattgaaccacttgttagaaaaagtatgcggtctaaaaatcgactgatgtacatacttggaattaattgcatggaacagctgaatcaagcccaaagtcaagaaggccattgtcaatgcatccccatgttgcaacgatggatcacccacatgtggaccgacatgcaaaccaatttggtatgcacctaaaactaaaattccttccaaaattccttggtaaataattgaactggcaacaccaccgctaaagaagttagacttcttaccacgcggcttgcgcttcataattccaacttccactggttcaacacctaaagcaatagctggcaaagtatccgttaccaagttgatccacaagagctgcacaggagctaagatatcccaacctagcattgtcatcatgaaaactgttaatacttcacccacgttacaactcattaaatatagaatggccttttggatattactgaagaccttgcgtccttgctttactgcttcaacgatcgtggcaaagttatcatcagccaaaaccatatcgctggctcctttagaaacttcggtcccagtaattcccatgccgattccgatatcagcttgcttcaaacttggagcatcgtttaccccatcaccagtcattgcaacaatcttgtcattagcctgccaagccttgacaattctaaccttgtgctctggtgaaacacgagcgtaaacgctgtagtcaccaacatgctgtttgaaatattcatcatctagtttatcaagttcagccccagttaaaacgcggctatcctgacctttttcaataatacctaggcgttccgcaattgcttgagcagttgtttggtgatcaccagtaatcattactgttctaataccagcactctttgcttcagccacggccgctttagcttcaccacgttctggatcaatcattccgactaacccagcaaaaattaaatcttgttcaacattatcagttgttggatcggtgtacaattggtcgactttcttataagcaagccctaagacacgtaaagcttgttgcgccatctgcttgttttgcgctaaaatattttgcttctgcttatctgtgatcggctctacttgaccaccattttcaatcctagttactcgctgtaacaacatatctggtgcgcctttgaccgctacaaagtattgctcgccatctttattaacagtactcatcaatttccgttctgaatcaaaaggcacttcttgaatccgtttgtatttttcaagcaagtcagttacatcaatgttttgatcaaaagcaaattgaatcagggcggtctctgttgggtcacccaataagtctccgccattttcaatcttagtatcattagccaaagtcattgccaataaagctgggttattttcgctaatactttcactattatcatgtaactttttatcatagaagaccttttcaactgtcatccggttctgggtcaacgtaccagtcttatcagaacaaataatgtctgtagcacccaatgtctcaacagcaggcaatttacggacaatcgccttatgtttggccatcgtttgcgtacctagtgccaaaataatcgttacaattgctggcaagccttccggaattgcagctacagccaaggaaacggcaaccaagaacatgttaatcattaaagtagagttacgctctgctgaatcagccttgagcactcctacgataaagacaataacgcagattgccaaaatcatgatggttagggtctttcccagttgattcaagtttcgctttaacggtgtatcagtttcatcagcattgttcaacattgtagcgattttaccaacttcggtgtgcattcccgtactagttacgattccttcaccacgaccataggtcacattagtattggaataagccatatttacgcggtcagctaaagcaatgtcttcaccttctaaagtttctgcatgcttttcaactggaactgattcaccggttaacgctgattcctcaatcttcaagctgtgggcttgattcaagcgtaagtcagcaggaaccacatccccagcttctagtaaaactacatctccaggaaccaattctgtgcttggaatagtaacgattgtatcatcacggcgcacatgcgcatccggcgtagccatttccttcaaagcatcaatcgcagcttcggaacgtgcttcttgaaagacacctaaaattgcgttcaaaatgaccacaatcataataattgcggcatcagtccactcatgagctaataccccagacaaaatcgcggcaatgatcaaaacaataatcataaagtctttgaattgatcaataaaacgcatgaacatgctttgctttttcttggaagctaaggctttcggaccatattgctctaatctagctttggcatcactagcacttaacccatccttaacggacgtgttaagatctttttcaatgtcggggatcgactcgacataatattttttcgccattttccctctgctatataaaacatagaaacatgcagaagtttgatattttccacataccagaaaaaaatatatttttcctttcctaattttatttactgtcgtcatcattggtattccgatattccatctggggagtaatcgcattgaccaactcctgcagcttaagggcttagccagccccattattttttattttgttaatgccaataaatttaatactgcattgtcatcacgatcattgctatagccacactcataacaaacatattcattgtgcttggtgccatgttttctattgccctgcaaagtgattttgtctgcaccatttttgacatagccgcaactggcacatctttgcgttgacgggtagcttctatcagccaaaattagctctttatcataccaagcacatttataggataatatctgtctaaatttgccaaacaaggacctctgtatgcctttggaagccacatgcgtcatcatcatttgcttgacattcaagtcttcaatgacgatttggtcataattatttgccagctcagtagtaaatttttgcaaaagatcattctgaatattgacagccctgcgataatcacgctgaagcttggttctcacttgcacgtaattattgcttcggccagccaattttccattaacccttcttttcttggccaatattctctgataatgcttgatccgcttgtacagtttctgcagtcttgccggcaaaatattgattctgccctcagtatagctgaagtgcccaacgttgacatcgatggcggtctttttgccagttttaacctttattccagctttttcttcgtaggaaagagcagcgtaataatggcctctttctctaaagatgctggcaattttaacctgtttcatcctcaatgcttcatatgttggaatatcaaaccatgatttaattcctctgggcttatccagtctgagcttgccattaataactttaactcggtcagtcttaaaaccttgacgtggagctttctttgacttgaaatgcggcttgccccagtcgagctgggctttgtcaaaaaagctcttccaagcgttggccaagtccttgactgccaactgcagacaacgagcagacaaggcaaactgccaatcagccttgttattgactaattcatctcgcacccgacactcattaggactaggattattatccttatttaaagtccgtgcttcatacatatcttgccaggtttctaaggctagattccagcagtatctgcggtaatcgcatagacggtcaagttctctttgcatggtcttgtttggttttagctcagctacctgtgttttaatcatttatttcacctccaatgcaaacataaatttagcaaaggatgaaacaaaaacaagcgaacaaaatattaaatttttagcagcagctaatttgtttctatgttttatcttcctgatcaaattaactgcatctttttctatttattgctatcaaatcctatcttttagtcaatcattatttcctcctcaaaaataaaaaagagacttacatgcttgtagcacataagtctcacgaattaagataaatccagaagtatcttacttcggctgttggattcatcgcaagcaattgctgttactcccttatgacaagttaattataagcaaaattttagctatctacaagttttagcgaattgcttttactttttataaaagtcatcaaagacagtaactggcaaatgacgcttgtgtttactcttattccataatttttcaatttgatcagctgttttatctgatacttccttaccttcaaggtaatcatcaatctcttggtaagttacaccgagggcaacttcatctggcaaatctggcttttcttcttcaaggtctgcggttggagccttttcatataaatgcttaggacaacctaattccttaagcaaagccttgccttgacgcttgtccaaacggaacaatggcgtcaaatcagcggcaccatcaccaaacttagtgtaaaagccactaaagttttctgcagcatggtcggtaccaacaacggcacccttattagcaccagcgatggcatattgaactaccattctttgccgcgccttaatattgcctttgttaaagtcagtaatcttttgaccagttgcttctacaaccttcaccatagcatcaactggttccttaatattaacaattaaatcctgatctggcttttgaaaagcgactgcatctgcagcatcttgggcatctgcttgaacgccataaggcaaacgaacagcgataaattgataagaatcatcgccagtttcctcacgcatttcttcaattgccatttgacacaatttaccagtcaaagtggaatcttgaccaccagaaatacctaagacgtatgacttaagaaatggattagcctttaaataatctttcaaaaaatcaattgaacgtctaatttcttttttagggtcaatttctggtaaaacatgttcataagcgataatttctttttgtaattctctcatcgaccaatgcttctttctctaattttacgccgaatgtcttgaatcaaatccatcttggattcgtataagttttgtgataaatccactggatattcctgcggattcaggctacgcttatattcatcccataaaccatcaaggttgtcagcacagaattttttaatttcatcaagactaggttgatcataaactaattttccatctttaaaaatatcatgtaaaagtggaatagcagtgtaatcagttaccaccttattaatatagttatattgtgggtggaacatgaagagcgcgtcaaatttgcgtggatcttcattataccgagatacccagtcaccttcatttttcttagcagtgtttgcgctaatccgccatacttgttttttacctggggtggaaactttgatggcatttaaagaaatcttcaatgtatcccgcatggcgcctaattcatcttccatggcaaccaacttgtaaacagcaccaagggctggttgatcataagcagtgatatacttggtcccaatgccccagacatcaattttagcgccttgcatctttaagttagtaatggtgttttcatcaaggtcatttgaagcaaaaatcttggcatctggatagccagcatcgtctaactccttacgaacttgcttagaaatgtaagccatgtccccagagtcaattcgtacgcccaagaagttaatcttgtcgcccatttcattagccaccttgatagcattaggcacaccactacggacagtatcgtaagtgtcaaccaaaaaaacacaattcttatgtgtttccgcatatgccttaaatgcgtcatattcactgccaaatgcttcaactaaagcatgagcatgagtccctgaaataggaataccaaacaatttaccagcacgaacattactagttgaatcaaagccgccaatataagcagctcgagcaccccaaatggccgcatcggtttcttgcgcacgacgagagccaaactccattagaccatcatctttaacagctaacttgattctagcagctttagttgccaataaagtttggaagttaataatatttaaaatagcagtttcaactaactgacactgggcaagtggaccttcaacttgcaaaattggctcgttagcaaaaaccagctcgccttccttcattgaacgaatagtgagctttaattttagattgcgtaaataatcaataaagtcatcatcgtaaccttcattttctttcaaatattgcaggtcactttcggtaaactttaaattctttaaatagttaatgatgtgttccaaaccagcataaacagcataaccgttgccgaatggttccctgcggtaaaaactttcaaaaacggcattgcgatcagcaatccctttcttgaaataggtatacatcatattaatttcgtataaatcagtgtgtaaagccaacgaatcgtctttggctaattctggataaaacattgcttctctttctgtcattaaaaattaacaatttcgtttttcattatacagccattacagtccattggctattctcaaaactatttttacctcaaagttaaatacactttttcaattgagtccagttgatttttaatagaaaaatgctcttccgcataccgcttttctgtattagccatctggcgtaactcttcatgggttttattaacggccagattaatctctttagcaattgaatcaatgtctcccgttttagcaatgaaaccatattcgggtcctggaatcattttatgaatatcacctacatctgtggacaaaatagggattaaattgtctgttgcctctaaaagcacaagtggaaaactctctgaatatgaagttaggacggctagatcaattcgcttatataatccgctcaattggtgttgagtcataaaaccgtgaaaagttacttgtggtgccatgtccaattgccgcgtcaaggccttcaatgcttcaagctgactaccatcacccgcgatatgcagacgaatatgctgatcatctaattttttcacagcttttaagagcaattcttgtcctttaaccttttccgtacgagcaacgttaataatattaaaataggtatgttcatatttagctggaatttcactatcactgtggaaaaagatgccattatagatgacatgtaccttgtttttatccacatgtgcgcgattaattagtagcctggcaaaacgctgagttactacgaaaatacaatcagcttttctcaacgcacgtaaattaagtttagtaaaaatattgccaatgattcccctaccttcaaagtctagataaggatctgaatgtacagtaatacaccaagctgcacgaattcgcttgtgaatcaaagataaaaataagttggcacgcgcaccatgagtatgcacaatatcatagtgcccctcattgataaacttagtcagtctacctaaactgcctaagtcataacgactattagctcctagcacatgtgtagtaatcccagccgctcttgctgcttgtgctactggtccttctgccagcgttaataattcaaaatctttgccttcatttttggcttcagttaacaaattaacaatatgtgataaaccgccgccattttctaaaccagcatttacatgcaaaaccttcatcttagtaaaattattttcccttcttttttgactgtttaactcgcacaacaaactgtggcaaaactaacatccgcttaaatctgctaggattagtaatcaagcgataaaaccactctaaatgcgtcttttgaaaagcttctggtgatcttttaacgatacctgaaaagacatcaaaactgccacccacacccatcatcaaagctggtgtttcgttcttacgtaagattgatagtagtttttcttgcttagggaaacctaatgctgcaaaaaccatatcgggttgtgccttctgaatgcgccgtgccactagttccaaatcttcagtaaagtagccgtcttctgcaccaactagattaatatttgagtattccttagcaattttgctttgtactgcatgaattacttgtggcttagctccaattaagtaaactcggctaccacgatcgttagcaacatccatcagccaagtaaacaaatcatatccagtcacccgctcaggtaacggctgcttaagcattttagctgcttttacaatgccaatcccgtcagcagtaatataatcgggatcattttttagaattttcataaattcaggattctcgtttgccgccatcacaatctccggattagcggtcacaataaaggtcgacaggtgattatttagtcgattaataaattcattttggaattggttaaaagttttattatcaaaatcaacacctaaaatattaactttgctcattttcacacctcatgcgttttcttatctagtttctattctaccattccgacacgcaagtacgagaaacatgttgtaagtgtcaatgtttttgcggtagcctttaaaccattagtctaaccttaatttcttaaatatttatatgacttaaatttctgcttagcttgcttaaataactattgccagctacctgtgcggttaatgcgccatgctggatgcctaaatgaacttcatgacgcttctttaagctgtcacgggccgctgcttttaattcctgttcagtcaatacagttatttctgaatcttcaaactcgctgctaagccaaaattccagctctcgattcttgatgcagcttaagatcctaagcatgccttctgctccagattttgaccatttcttgccttgccccttaacacggtaggtatacttgcggtggttgctctcgcagcagccaatggctttagtcacagtcagttttcgtttcttaaacggcttaatatcgtcccaatgacgatcaatataattctttaggcgccccagataatcatgattgagctcggtattcaattcatcaattagtcggctttctgcagtggttaggatagttttgtcatagctgtatttgtattccaaagcagaaatcagcttgccttgcaggtcaggcgcaaaatatagcctttctttgattttcttatttaggtgaaagacatccaagaaatgctcatgacgcttgcatagccctacaatgtcatcgaagtctgttttgacatatccagcaccgccatcggcgttgctaagaattacagtatcagaaagatcataagtattggccaggtactccttggcttcgttcagcgcatcaagtcggcttaaagaaacaaattccttggcattgattcgctttctgcgtttcttgcttatattgacaatgccttcacagacctgatagcgatgaaattccaaccggcttttagtgcctttgatcaccacgccatcgccttcaagatacaaaactgggacctttttcttagtgcctgcggcatcatatcttgaatctgcttcttggcccgctttaatatttttcccggccatttttaccaaattgcccacctgcatatggctaatattaaagccagacaggcaattgactgctagagcagtattgcgataagtggcaacgctgcttacttctaagatgtttttgactgctaaaatactgtagcgcttgtatttgtcaaagcctattaattcatccaagggataccttgcttgtttgcctgggcagacatatcttcttctgacatacctaacttcgccaaaagccatattgattgagcgctcattcttcttatcaatctgatagccctgtgctttaaccttggtaatcatttcatcatcaactttagctaaagccaaggccatgatttccttaatcaggtttaagaagaaacagattatttttctttcacgcttaatataattatcttcagactttataatatttgcgatttcagttacaattgaattcataaaagaccagcttctaatgtgttttttgttcttaacatcagactactggtctttttgtttgagctcaagtccaaattcaaaggacttgggcttttttaattatttattcaacttaccgtaaaaaattatacacttagaaacatgttcaagttttatattttattcaaacatgataagattgttttaataaaggagaaaaaatgaaaagagttattacctatggcacctttgacctacttcactacggtcacgtgcgactgcttaaaagagctaaagaattgggcgactatttaatagtaggtttatctaccgatgaatttaacgaattcaaaaaacacaaggaagcctacaatacctaccctgaacgtaaatacattttggaagctatccgttatgtcgaccaagtcatccccgaaaaggattgggatcaaaaaatcaccgatgtacaaaaataccatatcgacacttttgtcatgggcgatgattggaaaggaaaattcgacttccttaagccttattgtgatgtggtttacctgccaagaacgccaggaatttccactactaaaattaaagaagatcttaaataaaaaaatactccaattccattcaatttgaatgagattggagtttttgtttacttagaaaaagtgaattcaaatcgttctgcaacgtaacgtgcgcgggtgtattcgaatggttgcccatctgctagttcagttacctgtcgtctagtaattaacggttcaccttttttagctttaagaagacgcgcatcttgctcgttggcaattgatgcagaaatatgttccgtcactcgtccaatggcaaaaccaccgcgcttttctaaggttttatataagtgcgttgaaacatcttctttagaaaaattctttactaagtagtatggcaccgttacgacttcataacaaattggtgtcttatcagcgtagcgaatccgctccatccgcaaaacgttctcattatcttttagcgcaagacgctctttttcagataaagatggattgccaatctgataagaaattaacttacttgaaggaacttgaccattagccttagtaatctcagtaaaggacataattcctgacattttttcttgaaccttttgactagctacataggttccgctacccaagcgccgttctaaaattccttcatcttctaatgttttaatcgcttggcgtaaagtcattctcgaaacgccaaacttaactgccaattgacgttctgctggaatacgatcccctacttgataaacgtgattctcaatatcacgcttaatctgattgtgaatcttgatatacatcggttcttccatagtcgccacccccaaagtttagtactgctattattataatctaaattggtctagcttgcattaataacactgcttcaattttacagactattttttcttagcggtccacttcactccaagaatataaacatttggacgcttgttatattccacttcaacttgttcattatcattagcaactacactggcactaaattttgcttcatctttaacagctaagttagcctgattaggattcagcacaatattgtggcccttcatattagcttcaccgctcaaagctaaaaagtactcatagttcatatttccagtgaaggtaacacgtgtagcatcacatttcgcctgatcttgaaaatctgcatgagctaaaattacggcattgttcattgtaacttttgcttcatcaactactatcattcgattgatggttgaattttgaatgattgtccgtgtctttttatcaatataaaccccacccaaaaaagtagaattcataatattgctccagcagtcatcacttaaataaaggcaggaatcgctagcagacttaacttttgaattaagcatattcatccaagtttgcccatgcagtaatacataatctacttccgaattattaagatccaactccgcattcgttttggcaaaagtattaatactgccgtgaatctttgaattatttacaattgctgttccttcgccttcaattgccaaagcacaatatttgtccgagaaataatcaatttctgaatcattcatttccaaacggaaattggcatggtcatacatggaaactgaaccgttaacaattttggttgaataaagttccaacgtgatcttaccattaaccgcgatagctgctgtatcagttcccgtgcccttaataaagcaattacgcaaagttaaatagccatcaacgcctactggtacagctaggctattatgttcggtagttgtatcaatgcataaattttctaaagttacataacgactatcttctgaaacactaatatagccataaatagtcgtgtcttctggcaaagagcctgttcccttaattgtgatatctgttagtgtaatgccctgcggcaaataataatatccggggcccagcatcaacacatcatcggcacgcaaatcctttaaagcctcgtgccaactgactgaactgctagatccccctactctaattatcctagccatccattatcctttcatctcgtaaaaaccgattactattgtactaattttcttcaatttatgttgtatttttgctcatcaaaaaagctaggttcgattcctagcttcttatactatttcattttaacattccagtaataagccacattaccataaggagaaagttgaaaacctttcactctcttattcaataagtatgacgtaccttgttggaatagtggtgccgcaaaggcatccttttgaattaattgtttttcagcgttaactaaggcattcaatctcttctgcggatcagtggcataagttgaacgagccaagtcaatttgcttccagaagttagcattgtgataatctggcgctaaattaaacaaaccaccaactgtcaagaaatcaattggatcttcataacttggctgccaagttccgtaaacaaagtcgtaattgtgattagttgtgttagatagccgtgacttcaaaggaattgaccgtacccgtagagttagaccaggtaaatttttcatcaaattgctttgaataaattcacccacacgcttagcatcgtcaatatctgaagtaagcaattctaaggttagcttcttcttacccaattgcttcaaaccaagttgccattcctttttagcttccttggcattataggtaaccaagtcgccagcatccttgcggtaatcgttgccagttgcctgatcggtaataaagtttgcggcaacaattccatttgacaccttgccttgatgcaaaacggtcttgactaactgttgcttattaattgcccggctaatggcccgacgaatatgaacattgcctgtactcttacgcttcaagttgaaagaaagataaccattagttggcgtaactttggtatgatagctagaattattttgatactgcttaacaaaatcagaagtcaatgtcgtgtaatcaagttcaccacttctgaataagttaaccccagttgaaggagtttgaaccacttgtacgttaactttattcaaatcaacaattttcttgttccagtaagttggatttttcttgtaagtccacttcaaatttgaacctgtccaaccagatacggtaaatggaccattgtaaactagattcttactgctagtcccatacttagagcctaactttttaaccaatttagaattctgaggatagaattgtgcaccctctaagatttgtggcaaatatggaattggattagctaatgtaacttgcaccttatacttgccgagtgctttgattcccaatgaatttaccggtgctttaccttgagaaattgcctcaccgtttttgataatggcataagaatcggcatctaaagatgaattttttgggtcaacggttctgcgccaagccgttacataatccagggcagtaactggatcaccgttagaccacttagcattattgcgtaaggtaaaagtatagaccttctggtctttagaacgttcaacttttgtcgcaccagctaattctggctgatttttcttattaaaacggtaaagaccttccatggaattctgcaaaacttctgaactagtcgtatctccatacttgctcgaatctaaagttgaaatttcatttgtgacagaggtattcattgtcttagtcggtgcagcattactgtcattgttagagcaagctgccagcaccaatgcggcagctgctgtcatcactcctgaaaaaatccattttttacgtctcaatcttctcaccctttacttactttttgtttaatacttacattttacaagtatatctaatacggaagaaatttcaaatactttttccgtataatagctataatcaatacgtatacaaaaatggcaaaaaaaagaaacgtcacataggacgtttcttttttcgggttgggtgttcttttagaactattgggttagctggattcgaaccagcgcatgatggtaccaaaaaccattgccttaccacttggctataacccaataccagctgaactttttacttgtcgttcaacaatggaggagggtggattcgaaccgccgaactcagagagagcggttttacagaccgccgcgtttagccacttcgctactcctccgttagctgacttaattataataacgaaaatccaaatcaaatacaagacttttttgaaacttttttcaaaaaaaagaagaagccatgacgacctcttctcaaaatttaaaaattgatttatatctaaacagttaattttaagcctaatgccttttgtgctacttgatttaccagactccattgcttgtcataagttggtgaaaagaagaaatctgcttctgctaaatcttccagtgtcaacttatttctaatagctaagctcaaaacattggcttggccactaatgtcatatgatgaaagtacgctaccgcctaagatttggtggctgtcttcattataaacaacagcaatatagcaagtaggattatctttttcaggaatatagtctggacgaagataactctttaagactgtttcttttgcattaattcctgctcgcttggcattcttttcactgagtcctgttgttactgcatgtaaatcaaaggcttcaagcaattgtgcaccaactaagcccttaaagacacgttctggcttgtcttcaaataagtgctcaacaacatattgagcctcatgccgtgcagcaatggcagatggcatcggtactcttctgttagctggaatgctaaatgggaagattgcatccccaattgcatagacatcctttacattggttctaaagtaattgtctaccttaatgtagccattgtcataaagatcgatcgtgtttttcaaccaatcagtatttggcttaataccaactgtaataatgacacaatcagcagtaatatcacccttatcagtctgaactgcattgacctttccattgccaacaaagccagtaactttagtgttcatagccaggttaacaccatgatcagtcaattctttttcaaataagctagtataagtatcattcaaataattttctagtggtttttgcccaccgtcaattaaagtaacattcttgcctgctttagcgaaaacctcggcagctgcaattccgttaccagcaccaataactgcaacatttttaatagcttcatcttgagcagctgcattgatctctgtagcgcaatcatagcctctcatcaacataatatttttcaggtctgctccaggaagaggcaaacttgcggggttaacacctgaagaaataattagcttatcataactaacttctttggttgtaccatcttttacgtttttgacagtaaccgtctttttagctggatcaagagctgttactgctgtgttattaacaactttaccaccccgttcagctagatcttcaggagtaaagtttctaacgttgtcttggcctgtagtttttccttcaaggaatagcttcattccgcaagacataaaggaaacgaagtcgcctgcttcataaatcgtaacgtctacatcatcataacgatctaaaatttcataagctgcctcttggccgccgtgggatgcacctacaataatgattttcttttttgacatagcctgacctcctaataatgcagcaataattgtcgtttttaagtaatagcagttattgtaactggttacattatttatcttttaataagatatttcaattaatttgcttttgattagtgcgaagcagcaatatattttttatataaaaaagagcactactgatagtagtactctagagggaaattttccaaaattatcttatttagctaattctgctgatagatttcgttcactaatttagtgatttcattacgattaagaacttcatcatacatatccattgtttcctggattgtattttctaaattagtaccatgatttttggcatagccaataaacttttttgcatctactattttagcttctttaatcgctttttctgcagctcttttagcaacttcattcatctcatattctagcttattcatgtcttcgacccattttccgctattcacgtagtagtcgatatccttctgcaggctgatatccctgcgtagtacatcatccgtttttctagatcatttttacgtgttgtttgcatctcaatatcatacactcgactttgatcatcttgtgcccagatatctaagcgaatgttttgggattctagtccaatgttgccgtcatactgggtaatgacattaacttttgtcaattttaattcaggaaacatccgacgtagcagttccagacaattctttttattgctcataacatgaccgaataccaagtcgttagtaattcgaggatatcgattaattcttctcctcatattttacctcttttctttttcttaagtaggaaaattaccctccactatttattacgcaaaaaagtgcaaatttttttcagaaatttaaaaatttagacacgaaaaaagccgatgcaaatgcatcgactctttcagttaaattattctactttttaatagaagtttacagccttgatgtaacgcttgttgttgtttctgcagccttcaattctgtagtacttcttaccgttcttaaatctcatttgaccaccgtaagtagttacagtttgacctctgtacatcttaccagtacctggagtacgacggtatgatgaccaataaatgtaggcattgtgcttaaaagtacgttggttaccagtaatgttggttacacgaacgtattcgtccttgttagccaccttgtagtaagtcttaccgttgatagttacaacagttggaacgatttcaatgtcgttgtaagcgtagtacatgtgacctaagtagttaccgttcttgtcataagctcttgaatcaaccattactggcaaagtcttggtgttagtgtcaccagctggcttaacaagtgatgaagtcttaacccaaatgttgcttgagttagcatctgacttagacttagttgaaacttgtgagtatgatacattgttaagggttctagtttgatcagcaacgtaaacagtgtcaccatctttgaaagtagttgaagctggtcttacattaatgccataaatgtggtaagttgcgattgagcttgcgccattagcatatagagcttgtttgtggcttgaagtaattaaaacagtgtatgttgcagtagtcttcttaccagttaaaccagtagcagttaaagttacattatagtaacgtcctgcttctgaagtattaacaggatttgaagttgcttctagtgaagcagctgtattattattgctgttttgtacagctgaaataataactggctcaccattactatttacaaaattagttggattaaattgtgaaccaacagctacttggaatatttgaccattaacactccccttgctttgaccattcaatgaccaattgatcactggattttgagtagtatctgtagttgaacttgaacctgaaactacaactgggatttgaacagtagctgtttgcgtagaagtagaacctgtaccagttaaagtaagattgaaatcactagttggtaccgcagtaatattcttgttatctttatcaagagttacacctgcattcttaagaatagcagcaacttcactatctttaaggttaactttttctccactggcattattcgtactaaagaaaactaatcctaaatcattaattgccttagtaacactagctacagtatctttagccttaatagaaatagtagttggtacaacattagctgttttatcggtagtacttgcagcatcaattacttgattgccatatgtaaagtatgatctatctgttggctttgctgttgttgctgtagtagtacttgtagtaccagtagtgttagttactgtacctaaactaatagcagcgttaactggaacagctgaagctgctacaggagcaactgccaacaaagcggcagcagccatacttacaattcttgtattctttctcataattatgtggcctttcctttctgaaacagaaattcatcctaagcagtaagttatatcttcttctgcttgtgaaataattatagcatgttacgaacccgattactaaaaacaggatcgactcgtgtgtgtgattttaagaatacctcctaaaatcaccagtaataccctaccctttatttgttaaactgtagttaccggacttttacaattaagattcaaaacattacatttttgtgaagttttaaacaagttattgatttatgacagaacttatgtgtgttaagaaaaggtaattttaacacttgttcgcttaaaaaaattaaagctcttagattttttgattagaaataattgcttcatgttctttaatatgctcaactcgccctgcatcccccgcaataagtaacaaatataatgcctcaatcattgtcatacttgccacgcgtgagaaataatactgcgattgcatcaccgtctgccgcactgctgtctttaaatgcacatcagctaatagcgcaatcggtgaatcatcgcgattggtgatcgcaatcaccggcatctctttttgtttggctaccttaatttgcttaatgattcccgctgcttcacctgaattcgaaatcaccaacaagcaatcctttttactcaggttcattgtctgcgcaattgccgtttcaatcgtgccacctgaatcaattgccaacaagccaatctgattaaacttatacactgcatcagcggccaccggataagtatcgccctccgcactaacctgcacaattctgctttcagtcaaaaaatgcagcacctgatctaatttggcttcagtcacattctccaaagtcgccttaatctcggcgactttatttttttcaatcaattccaaattagcactagcatcatcacgtgacatattttgaagtgacacactttcagttgcattctgagctagttgaatttttaaatcatgaaaacctgtcaaatctaaattatgacaaaaacgcgtcaccgaagcatcactcacctcagcttcagttgctaattttgaaattgtataatttaccacctgttcgggctgttttaagatcacttgagcaatcttctgatcactggctgacattgtcgctaatttactatagattgtatcgataattttagtcattattctcaccttttctgtgccaaaattatatcatcaatgtaattaattttcacaattttatttttaaagaaaataaatttatattttgattgacgaaaatcatttaccaaggtagtatgtatttgtaaataattttcacaggagaaaataaaatgaaaattaattcgataagtgacctcgctttaagtaaaatcaagccgaaaatgactatttctcttggcggcggaagcaatgtatttaagttatctcaagcgattgcacagcataacttagacatcacattatattctccatccgaacttactcgctttaggtgcaaagaactcggattagagcttcttccatctactgcagcgactaagatcgatattgcttttgatggttgtgacagcattgataagaattttaacgttctaaaaagtttgggtggaattcatctttttgaaaaacaggcagcacaaattgccaaacagtttatcctactcttacccagtcaaaggatacaaccgattctgaatcctaaaattccactttgtcttgaagtggcaccgccttgtgttaatcaagtacagaagtatttaagcagtttacatttaactagtaagattcgacaagatagttcagtagctgcatttgcccgtacgcctttgggcaactacttaatcgatgtttttaacgaagattggcacaatatcactgaacttaatcgtcaactttgtttacaaaatggcgtagttagttcttcactatttgaaaacttaactacttcattaattactgaaaaagacggagaaattattgaacttaagagaggtaataatcatgaaaacatttaattggggaattattggtactggctggattgcacatgatatggctgatgctttgaacaaagtcaacggcgaaatttatgttgccgcaaatccaaatgaagaagcactccgtgcctttgtccaagaaaaacatgtacagcatgctttcactaatcctgatgaaatgattaaggatcctagcattgatatcatctatattgctaccccacacactttccactacgactacatcaaaaaggccctcaatgctggcaagcacgtcttttgcgaaaaggcaattaccgtcaatgcacagcaatttgatgaagtggctcaattagctaaagagaaacacctaatcttaatggaaggttttactctttatcacatgccaatctaccaaaagatgcaagatatgattaagaccggaaaatttggcgaaattaaaatgatccaaattaattttggctcactcaaggactatgatccgcagaatcgcttctttaataaggagctcgctggtggtgcattgctggatatcggcggctacgcaactgcttttgccattagtttcatggatgaatatcctgaaagtatcaataccacggtaaaattctttgaaactggtgttgacgaagaaagcggcattattttaaaaaattcgaaaggccaaatggcagtgatgtcattatcgatgcgggccaagcagcctaagcgcggactggtttcgggcaccaaaggttatttcgaaatcaatcaatatcctcgcggcactgaagctgatattacttacacccagagtgctcatgaggaaagctatgataaggttactgccggggatgctgatcaggcgcttgaatatgaagtcactgattttcaaaagtatattgaacaaggccatgacgaaggcgaattggaaaaatcgcggatgatcgctcacattttaaccagcattagaactgcctggggcatgacttatccatttgataacgaggaataattagttggatttcaaaagggatcgatacataacatcggtcccttttatttgcacttattgcttattttctgcgacatatttttctagtcgtttcaagccttctttgatctgatccatcgacgttgcgtaagacaaacgaatatatcctgctccacctttagcaaaaaatgagcccgcaattacagcaacatgcctcttttcagccaaatcataaataaacttggtatcatcttgttccaagcctgctggaattttggcaaaaatgtagaaggcacctttaggcttaacgcattcaaagcctaacttggttaatccttcataaagcacatcacgccgcttttggaattctttcttcattggttccgcatcgttcattccattgcctagtgcttcttcagctgcatcctgcattggcgttggttccgtcgttgtgattgcttggtgaatcttagccagttgatccaaaatcggcttaggcgcagctaccacaccgattctatagccagtcattgcccaagcttttgacacgccattcattaaaacaacttgatcatgtaaagtcttttccatcgaagcatgtggctgatcataattgagctcactataaatttcatcacaaagaacaaaaaccggcttatctcgaacaacatctgctaaggcatcaagttcatcttgtgaatacatcacacctgttggattggtaggataattcatgacaagcgccttaacgcgatcaccatacttgtccaatgctgcttgcaatttatccggcgttaatttgaagtcatcgtcagaagtgtcgatttgttcaaccgttgcacccatggatagggcatccccaatataaagcggaaaaattggtgttggcaccaaaacaacgtcgcctggattaagcgccgcagtcaaaaagtcgtagatcgactccgttaccccattggtgatcaaaatttcgcttgggtcgtatttttgtccatatttttcagctaaaaaatcggctgccgccttgcgcaaacctggagtcccgttagatggcgcatagtgtgaatggttattagcaatgctggcttcagccgcttttttaatatgctctggcgtgttaaagtcaggctcaccaatcgtgaatttgacgatgtccgaaatcttgttggtgtaagctgcaaaggccaaaatctgccctggcttttgttcaaccaagccttttttcatatgttttgttaagtcgaccatagtttttcctccttatatcgaactaaatcaattcaaatataggagtctttttaatctttgtcaaaggaaatattaattttgatatctaaagtgcacattaaatccaataattaacaaagcataaatactataaatagccgtaacagtcggatacattgcctgatactttatcagcaaaagaataattaaaactatcgccaaaacaatcgttaatattctaaaacgttgaaaatatgacaaaatcggtaaagccactgtcaaaactatatcagttattaagatagtaaaatccaccggatatgatttgatataaaaaaactgaaatattggcaatgcttctaacagtaagaagatataactaataatcccacatattaaaagcaactgattaagtatctttttatagtctttcattaaatcaagaacttctcttttttcatgtaccagtgcttaaccagagtggtcaatgcaatgtacaaggtcaaaagtacaagaactacgagaacataatattctgggatcggaccgaatttcattaccttagccaagcttggaatgtaaggcattgcagtaccgatcaatcctgcaccgatcgtagcgagcattactacgcctgaagagtgctgttgtaagaagggaattgctggatcacgcaatgcttggataaccatttcctgtgtccagagtgattcgatgaaccagccactccagaagatggccataaagacagccttttgccctggagtagcagccacataacttgtgcccacagtacttggacaaatccagaagtaaagcaaggcaaacgtaatgatatcaaagattgaagatgtcggaccaaagaagaacatgaacttaggcaacttctttgtctcccacttacgtggtacttccaagtatttttcaccaactctatcaaatggaagtgacaaacaagatgtcccgtagatcaagtctagaatcaacaattgcattggcagcattggcaagaatggcaagaatgatgatgccactaagattgacaaaatattaccaaagttagatgacaaggtaatcttgatatatttcatcgtgtttgcaaagatctgacgcccaattcttacaccatgttccaaagtacgtaaactcttgtgcagcaagataatgtccgcactcttttttgcaatatcaacagccgtatcaactgagattgctacatcggccttcttcatggctggcgtatcgttgataccgtctcccatgtaagcaaccgtgtgaccattttccttcaaaatctgaataattctagcctttgactctggtgaaagctttacaaagaggctacattcttcaaccatctttttaacttcatcgtcgctcttaccagcaaaatctttttcactataaatgtacttggtgttcaagcctactcttgaagcaacactcttagttacagcagcgttatcaccagtcaaaatcttaacggtaatatcgtcttgctttaacttcttaagcacgtccttaacatcatccttaggtggatcaaggaaggccaagaagccagttaagatcaaatctttttcatcgctaacattgaattcaccggcttgagcaggattgttcttgtaagctaacaaaacaactctcaaaccatctttgttcaaatcttcaatgtgctttaaaactttttctttgtaatcatcagttaaatcgttgatgtgactgccaacttgcacacgattgcagcaagcaagcatttcttcggcagcacccttagttaccaggatacgaccatcgccgtggcgcttgaccacgacactcatgcgacggcgcttgaagtcgaatggaatttcatcaaccttagtgtagtcgtgtttaatttcattaacatctagctcatcgctagcggcatcgatgatggcttggtccatcaaatcgtgcatccccgtttggaagtacgagttcaagtaagccaagcgcaaaacctgtggattttccttcatatccaagttgtagtgccgttccaatacaaccttgttttgggtcaaagtaccggttttatcagtacaaagcacgtcggcggcaccgaagttttggatggagttcatctttttaacgatggtgccgtgcttcgacatttctagcgaacccttaaccaaattactagtaacaataactggcaacatttctggagttaaaccaacggcagtagcgatggcaaacaacaaggcgttgagccagttacctttagttaaaccgttgatgaccaaaactaaaggtgcaatgatcgcggtcattgttaacaataatttagaaatgttcttgataccaacatcgaaattagtttccttaacgtcgttgtttgaaatatccttagccaaacgaccaaagacagtttgttcaccggtggctaaaacaacgccaacacctgaacctgacacaatagttgttccttgatagattacatcaggatagtccaaatattgatccatgtctttttgatcgggcctcttagtcgcaatcttttccacaggcgttgattcaccgttcaaagaacttgatgaacagaacaagtctttagttttgagcaatctaatatctgctggcaccatgtccccagcgtggatattaataatatcgccgacaactacttgcttggtagaaatttcttcatccttttgattgcgacgaatattggtagttacagacaccatatttaagagggcttcaactgcgtcattagttttcacattctggataaaggatgttaatccagaaataatgatcatcgcaatcataatgatcacagtactcaggtccttttgatctgccggcacgaagacgtagtcggtaaacagcgacaccgtcgctagcagcaacaggaccattgtaaaaggagtgaagaatgattcaatgaagaaatgcaatttcgtgttgtgcttcttggtagcaacttcgttaagaccattcttctccaaacgctctttagcttccgccgaagacagaccgtctagcgaactatgtagcgtctttaacgcttcttcgggagtttgcctagcgatctgcttaacaaactctgtatcggctgtcttcttattaatcagcaacttgttttttgccatgttaatcacactttctgattaaacacgcaaacaaactaaaaaggagccaataccaattagtattaactccttatctaagcgatgtttcctcgtcgttcagttttgacactacgtgacgtaagcacaggctagctatctggatctcgccttatcttgacaagaactattttactcgttggcatctctggatgtttccgggcgatagcttgtgttcacgtaggagcctcacctaacagtttatttgctttttcaattttcatttttattatatgcatattatttgacaatgcaattatctttactaaatcgttagaaattgtaaaagaatttaagaatgataaaaaacacgtgtttgcaatgaacacgtgtttttttataatttaattttgatatactattctatagacatggatatgttgcaactatttgtgtttagtagttttagcataactaaccacccctcacacattttgaaattacggcggtgagagttatgcataaacggatagtttggaggtttagtgctccgtggtagcttgggctattgcaatcagcatcgttctaggtgctttaggcaatttagctatcaatttggctatagcctatgcgataacaaaaaaagctaatcgcaaggattagctaaaccaacagttatctgaaactacgatcgaagtcaacggattgcggccgtgggcttcttttcatatacagattataacatgaattatccgaaacgaataaaaaagatcaggctcactgcctgaccttgctattgggttagctggattcgaaccagcgcatgatggtaccaaaaaccattgccttaccacttggctataacccaatcttcaaaccttttacttgattggttctatttgaatgacctctcgatcacccaacagatattagtataggggaatgaagaaaaaatatcaaggaaaaattcaaaaaaattttgattttttcacatttgctcgaaggatactgaatctttcttttatgaattataaaattaatttgtttttttacgattataacttttgtgacttcttaaccttattcattaattcaaagtcgttggtaaaaattccagctacaccaagtttaaagtacctttttgctatgcttactttatctactgtccaaattctttgcgtaactttgctaggtaaataccaatgcggatggatcgctgcaaaatgattcttagccgcaaactgttcaggaaacggcaccggccatttgtttaaaaagcaatattgttggtggggatcaattcgctggcaattttttaaggtttgataattgaaggaagagaaaataatgggatgcacaaaatgatattcttgtgctaacgccaaaacgatggcttcaatcccctcatcatgaatcttgttagtcttaaattccaagttaacatacaaatcctgtccctgaagaatttcaaataattcacttaacatcggtaccggttcaccgttagctaaacgaaatcgcctgatttcacttaaggtatagtccttaatataacctgtcccattagtagttctatctaacgtttcatcatgcattactaccggcactttatctttagttaagtgcacatcaaattcgacaccttcagcgccatgcgttgctgcatatttaaatccttgcaaagaattttccgcaaatttgaccggtaagccccggtgagcaaaaataattgtctgagtcattttttcacctacaaaaaaatgccgctctcgcggcatctgctctattttaatctaagacgattgcaccttgagttgccaaagtatcacgaactagattcttaacatctcttctaactaccataccatcggtgttctcaacgtattcaagatattgagctgacttaatatgtgcatcataagccttgtcatcaaagtaaacttcgacaaaataccattcgttttcgttcttcttattgactccagacatcataatttccatgcctggttcagcagccatgctagtcgtcatttctttcttaacttcatgcgcaaacttttctgcatcttctggtttaacttcaactttaactaagcgcattacaaaatgatctgcgttatcattcaaagcatcatgagcctttgtggtaataacttcgggctttaattcgattacttctttgtctgtggaaatcttgtcgatggtttctgcaaaatcatcagcatgtgctgctgcaatgtgcaaatcttctgccaagctattccggaacaattcgatttcgtaattgtcttcaccatgagcatcgtcatgtgcgcttccaattaacaaagttccttcttcagctggaattgagttgtgcatgttattttcaacttcacggatatattcaccgcgatcgttttccttgatatttaatttagtaattctaaaaattggtgtttcatccatttttcttgcctcgtactataatctttccacacctatcattataaactaatgcagaaaaataaaagcccctattcaccagttatttgatcaattttaaccgctttagctggccattcagtccgtacatattccaatgtactgccttcattgctagttaactgcacaaaagaacaattgggcagacctaaaaattcacgatggttagttttttcattaatgtattgcgacaaactatcgccatgaccaacaactaaaatattatcgccatcttgtgcatcccgcatgatcaagttaatcccgcgctccattcgctcaactacctcatgattatcttccacgcgaaatttgcccaaacgatgcagcggccaaagtagcacattgcgtgcctcaaaagcgccatagcttttctcttttaattcctttaatcgaacatactccatctcaggcccagcaataatctctaaagtatcacttgccctttcttggggtgagcaatatgctctagcaaaattaattccctgatcttgaaaataatcccgcacggcttccgcctgcttaatgcctaatggtgttagcgctgaatcacagcttccctgcatgcggtgtcctttattaaaccaagtttgaccatgtctgactaaatataaattaattgccattttgtcttactttaaaccctctgctggccacacgtatgaatcaaaatggatctttttaccatcaactgttagcttcacgattgaagcattgccaaaaccgccaaagttcttattctcggtagcatcgcgcacaaacttagctaaaatatcaccatgtcctacaactaaagcagtttgaccatcctctaagccgcttaaaatctcgactaccgcacggtgcattctagcaacaacgtcttcgtctttttccatagttgggtctacgttaggattattataattccaaggcaataagaactcatcacgaccttcaaaaatgccataacatttttctcgcaggtcttttaaacgcgtataaggcatttgatgatcagtaataatttccaaagtatcgcaagcacgctcttgggttgatgaaaaagctttgtcaaaatgaataccctgctttttaaaataatcacgggccatttcaacctggcggatgcctctttcattcaatggtgaatcacaacgtccctgaactttatggtaatagttaaaataagtttgtccatggcggactaaatataaagtttttgtcatattttcctcgctaaatcgttttttcctttatcttatcaaaaaagcacgcgtcgtgcgtgctttcatattttttcgttaaattttgaagttcttgttgtattcactcgaatttacaacaaaacttggcacactaatgaagtgcattgagtaaatattgccagtcttggaaatgctaaagccataataattgtagtccccatcatgacgtgagccctgtgtattaaataaatcaccggcatgttcccattcgcggtaaaggctcttatcattacgctgattttccccagctcctgcaaagccaaagatcatttgcttcaagccaaagtaaatatttcgcttcatttcagccatagacataatcttcttattagtagaaaaaccagccatatcttcgacataattatcgtttaattctaagccatgtttcttgcaagcccgtacaattccggcaacatagtgatcgccatctttgatactcttgccattttgctcgtattcttgcgcaattgaattagctaaggactctactccagaactataaacccacggcttcaaacctaattgactacgagcactattaattaggcacaaagagaattctgccagttctttttgctcactagcagaaagatcggcaagattgatcattttttgatcggctttgctttcacctgagctaacacgtgaaaagtcgttttgctccattcctttcatgcaagcctgaataaaactagcacttggcttccccttatatgcttgcaataaactagctttcgtatagccactcggcatcttcattgtagctgttacataattctgcgttgcagcagtctttttaacgagtttggcatttttagctaataaccattgagagttatttccaatcttataagccaaatattttttcttgcccagctttaaatactttttagcagaataagaatactctcttttagctacagcataatacttagacttcttgcccttatttgtataaagtctaactttcttagttcctttaacctgaacttttcccttaactgctgcttgaaccgtttgtggtgtcgtttcgtgtattacactagccgtccccatcaggcaaacactagtcaacaaagtcacaattaatttttgcttcatagctgttccactttctgtatgttttgattattaatatttgttatttaaattatatcgtatttatttaattaaaaaaatcaaaaagagacacactatcattttgacagcatgcctcctttaagttagtttgattttatttagttttgaaaagaggtttatttttagtaccagccgtttgcttgccagaatgccttagcagcagtccatgagccataacgacctttgacatagttatcagctactcgctcttggttagctgctgaatagtcaccattcaagtatgaagctgaaagttggtatttaccaacgtattgaccatttgaagcaccgtatgagccaccagattctctaccggcaatccattccttagcactagcttctgaaccacttacagttgaagtagtagtttgagtgttggtgttatttgctgcagtagtagttgctgcagaattagtattttcagtttgagtttggtgttgtactggagcttgggttacagcagcttgagtgtggtagccgcgagttacatacttagcacgaacccattggttcttgcctaagtcataccacttgtgacctttggcatcgtaagcagtcttaattactttccatgaggtgttgcttgccaaagtttggccagtagcctctggattcttgtagctgttgtaaacagtgattgcgttgtctgaaacgttcttaactgttacaacagctgtatcgttttctacaatagcagcttgagcagtattagtgttgttattagctgctactaaacctgtaactgataaagcagttactgcaattgacttaactaagatagatttaattttcaaaaaaattctctccttaaaattttaaaagtcataagtaacgaattttcaccttattcgtccgtcccattcaattgacacagcatatactaccttgcttaaattgcagaactataacaggaatatcacctgcagattaagaaactattgcaaagtatgtcaaaattgtaacaattgtaatatttatgtaaatttattcagatgatacaaaaccgcatcagatcgccatttaactcgatttttaatttttatttgctatgtgcaaaagcttgttcgcatttaatatattgaaacacttttgcaaatagagtagagggagttttataactcgcccctctcattgcaccggacgtacggttccgtatccggcgctacgtttgtgattatttacgagataaataatattctagcggatcgaccaagcctgggcgatccgctttgcttatgcccaatacttttgggctaagcagaaagttaatgacatgacccgtacttcttttataccaacctaagcgcgtattagctactttatgaatatcttcatcactaaaattgcactttagtgccttgttaatccgcattaagttaatgtatattcgttttggtagtttccattgtttaatgattaccacccgtactttatgacgcagccattgactgaacttaattagaaaatatttcatgtcgccaactctaaagtaattgacccagcctctaactacttgatttatcttagtaaagactagtgatagaggctgagcagctgcttttctgcgacagagaagttctctcatcttgtcataaagcttgattttgcggtcatctcctggctttgcttgccagtattcgccacttttccagaaggtaaagccaagaaagttgctcttggttggtcgtacaactttggttttggttgcgttgacctttaggaatagctttctttctagccatgatgaaattgaattcatcacacgtttggctgatttaccgcttttgacaaagatattgcagtcatcggcatagcggacaaagcgcaggcctctttgttccaattctttatccattttatctaaatagatattggatagaattggtgaaagagggccgccttgtggtacacctagtttattaggcttaacccaaccatcttccattactccagctttaagaaaggctcgaattaaatggagggtggttttgtcatttacttgctctctaattattgaaattaatttatcatgatttaccgtgtcaaagtatttctcaatatccaggtcaacaacccattgatagccttcgtttaaatattccaagacttgttcaatagcgtcatgagcactgcgtccaggtctaaagccatagctatgctcactaaaatgaggatcatagatcttcattaatacttgggcaatagcctgctggattactcggtcaacaaccgtgggtattcctaaaggacgtttcttaccattagctttaggaatgtagactctgcgaacagcttgcggacgatacttcatcttcatgatggcgtcctttatttctacttgatgctttttaaaatagctatcaagctcatcaactgttctcctgtctacaccaggcgctcccttattgattttgactctcctgattgcttccttgagattattttgacttaaaatctgttcaattagttccatctcgtgatatctccatttctacttgtaaatttattcagaattgtcccaattgctttcaccatcaaagagttacgttctctttgtgctaggctatcctcttatccggactgtctgaacattgcttatagcgagatatgctcttacaaacattaggcccttcgctccagtttcattacaaaaccttcagcactactacgacctcagctgacttctcgcgattaacctttttcgaccaggcttacgatcgctgatattaaagcttactcggtttcacctgtccacgagatctctcggggtaagacattcatctttaattttccactgccccctggtttaccgtcttggttttacggttgtcctttggactttaacttgtgctgcagtctcatccaccatttggcctgaccaggtttctgtacgtaggctcggaaaactcgctagccacttccttcacccatagcgtcaccgctaacggcttgtggttcgctacacttggcgacaactacccgtgatctagactttcactagactaaacaaatgccatgcccgacacacaacgaaaaaagaaagagtttcctctttcttttttaattctcacaaattttttattaatttattccattattctgccttatcctcttctataagttgacgtttattaagtgccgcaataaatggcaggtaaatcaaaatgtctaagataatattgattacttgcaaaattgagcccgcaatactgcctgttgccaaaaaaactgaaataattggcggcattgtccaaggaattacagtcccattacataatagaactaagcctaggttcattgcacaataagtggtaatcgcatttaacattggcgcaatcataaatggaataattaacaacaagttcattacaactggcagaccaaacatagttggttcattaatattgaacaagccaggtacgatggtcagtggtgctaaaactttattttgtttacttgcgcgcttgcgccatactaaatatccaatgcaaagcactaacccaatagtggcacctccatcacccatgtaaacaaagttatcgataaatggttgcgtaacgatatgaccaccatgagctaaatctaagttacctgcttgattcaatacacggttagcatcggtttgcatcaaccagattggttgcatagcagtattaactacgttaccaacatgaataccaacgaactagaacaagctcaataaaataattgaaactaatgtaccaattaaggtatcgcctaatgcacctagtggcttagccaaaatattcatgattacatcgtgaatattgccccatccaatccaagcaaaaagccagtaaacacagccagcaatagcaattacagcggcacctggaattaaagctgaaaagctcttagctacagcaggtggcacagtagctggcattttaatttggatattatgattaataaaccattggaaaatccatgcacttaggagaccaaagataatagctacaaataatcctctactacctaagtaagtgtaagggaagccttcaactggaactttatctccactcataatacttggcgtcaaaatgaagaatacagctgcagaaacaattccggcagaaacaccatctgtcttatattgattagcataactccaagcaattccaaaagctgcaattaagaccatgatcccaaaggagccattagtaatcttggctaaaatctgtgccaggcttataccatgaacagcagtttttgatagccaatcagaccaaccggcaactggaaatgaattaatgatcctacaataattaacggtatagccatggcgataccgtcacgaacagcaattaaaggtttaaaactgcctattttagcggctacaggcataatgtgtttgttaacaaacgcattcaaacctccgctcgatttactattagccataataattccctcttcaatctaaaaatgatctcgtgtttctttggtatatacctttcgcaatataacaatatcctgaaagcgattttattaccactattttaaaagataattttttgcttatatttttaaccaaagtttgattaacaaaatattgcagttatggctgtaagtgctatagtttacatgtaatcataaaaaaagcgaggaaataaaattatggctaaatacgaagtaaagttaagcgaagaagatttacaaatgatcaaagattgtcattcaaagaacccttcaatcatgaaggctatgaacgaagccaagaaagtcgaagattaagcaaattttgatctctaaatcgaaaaaaggcgtccgcaagggatgccttttttattggttttcaaatcttgtaccgtggggatgcttccagttataaacacggactattttacccatgccatctagcactacaacatttccatcattatgtggataaatcaatggatcagaatgtgaaccaccgtcagtaaaaattcttgctggctcacctgggtattgcactgttctaactatacaatcatcaattgatagccgcctcatttgtcgaccatcatcatattttccttctaaagcagctgttggcgtatgaccagtcacaattgttttgcccgttttgttatgagccatcattttcaataaggaatcggaataccaatacttatctcgtgcccaaatacggtaaaaatcatagtcaaatttcaagccatactctatctcagagtaagtttccggatcattatactgttcatctggccgcacacccgcatgaacaaaaatcaagtgtggcgtttcatacataataggacagccttttagaaagcgataatactcactatcacgcaactcatcaggcaaaactgtactgccaaacagactaactaggctcttgccaccaccgttataaacccaaatgccatcttgatgttcctgcttctccgcaaaattgagtaacatttgctcatgattacccagtagtacgattgctccttcgcttttttgctcaattaaataatccaatacttccttcacatgctcgcggccatcaacatagtcaccgcccgcaactaattgtgcttctggaaaatctgctgttgcctgcttgattaagtctaaggtttctaagttgccatgaatatcagaaatgaagatatagttctccttcactcgatcatccaacagcgttcgattgataatttttttcatttcatactaccccatgtgctaaattaaactaacatttttttcttaattatagcagatgtacactggttctttttctatgcaatcctaaaattaacctccggcaaaaaaaaggctacaatagatatgaaaagaagtgattgcaatgtttaatgaagaaaatgcaattgatgccaaggacttacacgttgattctttcaaatatcaatcaactgaagacatgccatctgatgcttattctagctgggaagaaaaacacccaaacgccagggtattcaagcttgaatttcgcaacatcggcgaaagcaatgaatggcaggaaatgatcattatctacactgaataaataaaaagtggaagaactccaagcctagtgtgtttcttccacctttttacttattttgattttctttttccttcaatttgtgcagaatccgttcattttctttagtacgtttttcaactgctgcatcgatgatcgaatcaaaccaatgattatcagaatcatcgcttgtttgatccttcttttgaggaccttcattttttacacgtttgtcagtttcttcattaataatggaatccagccaatcaaaattatctggatcatggctcttatcagtcatttatttttcctccatttttgatttaaattaatttatttactattctttttgactataattgagttaacaagatgaaacaagaaagaagtgttcgaaatgaaaattacattcactgacaaggcgcttgactacttaaaaagacgcgaaatcttgaataaaattctaattttaatcgccgacgatggtggtggtaaatattctatcaaaggcggcggttgtgcaattggcagtcacttttccattatttatgtagacaaagttgatcctgattatccaatcaagcttgaaaacgaccaaggaatcaatatttacacttctaaatacgacaccacaatgatgggaccaaatttagtggttgactacgccaatgcatccctcaacttaaagagtgacgaaggattgcttgatggcggcgttgatatcggcaatggcgccgagttaattaaagctcaaaagaatgtaaaaatgaccggcgttgaatggcgttgctagattaagatgatcagaaaagacagtagtttgaaatcaactactgtcttttttctatagaaattgaccactattaggatcgaatccagtacgatctgccgcggtaatctttctaattaccttacatggattccccgctgcaattacattatctgggatgtcattcacaactacactgcctgcaccaataattgaattacgtccaataattgtatctggagttacgctaacccctgcacctagccagacattgtcaccaatgccgatcgaatgtgcaacacaaccaccggcttttcgctcggctggatcaaataaatggttgctggtatacaagccaaccttaggaccaaacaaaacattgtttccaatataaacaggcgcgccatctaaaatcgtgcaatcatagttggcataaaagttatccccaacatgaatattttgtccaaattcacaacgaaaattagggttcacgaagggatgctcacctgttgaaccaaagagttctttgattaatatttcttttttagcgtgatcattctcattattaatattattggtcttcaaggtagcaaggtctctcaaggtgccaaggcgaggatccgcatcattataaggacgaccagtagccatgtaattaaattttgttctaagcgacatgattctttcctttcattagttcttctatttttattatagaaaagaaaaagcgctttcgcatgtttgacgcataatatttagcacactagccctaatcttattgcttattctataatggtaaaaaagaaaggattaaagccatgaaaaacttcaacaaatttaccgctaaatttgctcgccttttacagaatctactagtagtcgcaattggtttactcgggattattctgatcatactcttattccgcgatctaattccactttgccaatcattattttcaactaagatcgaagaaagcaactccgagattatgtcagaaattatcgttttcttactcttctttgaatttactgcaatgattatttcagccttgcgtcatcacggtcacactagcatcaattttctattgggcttaggtgttactgcgctaattcgcagtctgattacttctcatagtaacatttggagtacgcttgccacttctgcttcaattttagtactagtaatcgcaatggttattttcaataaaaatctgcgtaatatgtaaaaaaactgtatcactctaggctaatgtcattggagtgatacagttttttgttttactaattaactttgcgccatgaactcattaagttgtttcttagaaaaaacattgccatatttgcatactacgtttcctttcattattgaacgtaattcacacaaccaaaaaagcatcatttattaacaatattgaaaataaataatgctttttagtaatactctgatgctgaatgccagagtcgaactggcgaccttctctttacgagggagatgctctaccaactgagctaattcagcaaactcacaacacatgaattataccaaatgtcgctaattggcgcaacgacctttttctaagctagcattcaaaaaagaacattatttccaatctaagcacaatccttgcttgtgcaattcttctggcaattgatcacgatcagtttcatgcagatcaagttttttacctgtaatctgcttagtgaatgaatcaatgcgacggttagaatcacgtaagtcataatatgtcgtaactatatcatcatagtctttaaggtctttcacatcaaagtctttcttataactaccttcaaaacaagtgaacttaagtggtaatcgtggttttaattgtggcttttgatctggcataccgacttgcatccccaacactggaaaagtcaactcaggcaaatcaagcgtcttaagcaaatccaacggatgatcgttaaccgtaccaagtggcacatagcctaagcccatactttctaccgcattagcgacattttgaaaagcaagcagcgtatcttctattgcttggaaaaagatatcagttgtgtgaacacggccgtcgtctttgtcaagttgctttctaatttgttggttacggtacaagtcaacgataaaaataaacaaatcgccttctgcaccaacatatttttggttacataacttttgaattttcttcttttcttcaggatcggtaacgtgcagtaagctagcattttgcataaacatgctggttggagtttgaccaaagacagaatacaaagtttccagttgttctttagtcaaagtttgatccttaaattttctaatagaacggtgatttaattgcgtgtcgattgtttcgttatgtatcattttcatccttcttactaataatcagtaagttcattataacaaataatatggctacttttcttcaaattcaattccgtaatctgcttgctctccgtgctcagctaaatcaagccccattaattcatcttcttttgatactctaattggaataatccttttaagtaataaaacgattatcgtcgtcatgatccctacaaatatgatagtaaataaagttcctaaaatctgagctgtaatcaaatgcaacccgccaccataaagcaagccattttcaatttgcgggttaacaatcttagtcgcaaataatcctgtcaaaatcgaacctacaattcctgaaacgccgtgacagccaaatacatcaagtggatcatctagcttcaattttggcttaatcacatgaatgaagccgtaactggctagtgtacaaataaaaccaatggcaaaggctcctgccacagtaacatagccagctgctggcgtaataccgactaatccacacaaggcacccgtacagaggccaatcatagtagtcttttctttaataaacatatccaaaaacatccaaaccacaaatgacgtaccagttgcaacagttgtagttaaaaacgcttgtgtagctacatcgcttacagttaaggcagaaccaacgttgaagccataccaaccgatccataatatactggttcccattaaaacccatggtaagttataatgcttaacctcaccatttggatcaaaatcaattcttggaccaacaaaaattgataaaaacaaggcggtaataccggcggtaatatgaactacagtcccacctgcaaaatcaagcatccccgttttggctagaattccatctggtgtccaaaccatatgaaccattgggtaataaatcaagatcgaccaaattgcgacaaatgcaagtaaaaatttaaatttcattcttccgaccaccgcaccaacaaacaacgccggcgtaataatcgagaacatcatctgaaacattaaataggtcaaaattgtgatgcctgaatccttggaataaagcgtctttaaatcaaagccgtttaaaaagacacttttactcaaaccaaatattccaccaacatccttacccaaagccaagttataaccaaaagcaataaacaaaacgattgcgacacctgtaatcatgaatactgaaatcatcgtattcacagcattcttctttgaaaccatgccaccatagaaaaaagcaagtccaggtgtcataaagaaaactaaaacactagcgacaaaaacaaatagagtgttcgtttgattaatcatctttttttctcctcaaagtaaaatagttagtcctaatattttaaattggtatatacactatttcattgatgttgcagcatatatgcttaattaaaaaatattggtttgataaaatttaattctcattatacactcatttttcttcttgtcattaattttctataaaaaataaaggtgcatagacgtatggcttctatgcacctttgcatatatttgcttttaattatttgttttcgttttcaagattgttgattgcagtttcaaccaatgcatatgcttgttgagcttggttcttagcttgaacatattcgttcaagttgtcatcaccattagtaagcacacgtgcaaatgaaatttgttcagccatcaagaagttgaacaatgaatcccacttcttgtcttcaaacttgatttccttagcagaaattctaggcatcatttcacgtgtggtattaaatgccttttccaaaatttgttcatctgcatcggttaattcacgcacattgtatgcttggtggatttggtgaacctttaaaagttcttttaataaagttcttgcttgtgcatcttttgaaactgattggttaatttttaaagccatttttacctactcttttcttttttattaacaattataccaaattgtcttcgaccatttgcttaacgcagcgtttcatttctttaatatcaagaatactgtaggcaaattcttttctaagtagttcctttggcaaatattgatcgtacttgtcgattcctggcacttcgtttggataaaccagatcaagcggatcaaagtctttatcagcttcttcgcctaaaatgcgccagaagtcatgctcatcagcatccatggcaaaatacatgaagtatggtctagatgaattaaagccacggatatttaactttttaccgcacttaattcgaattaatcgctctagtgccaaaaatgcataagtcccagtccatggaaaaagacaccacatattaccgcccagcttgatcaaattattctttggcagaccagctaaagcggcggtgtctctagcttgcgtcaagcgagctttaccattttgcatcaaatatggatacatcatcttttctgcaagtacctttttcattctctgtaaaattttaggttgaatatctccaggtacatctccaaagtaggcaggaattctaccctttacttcatggcaatatacttgatgacgcttgatatccacgtcttcgacaacccatacacgtccagcaatcgcaatcttgtctcctacaggaggtggcttaacgatcgtacctaattcttcgctgccagcgtgaacactgaattcctcgttttcttggaaaactgcgtaaaatttaaagttattcacaactcgttcaccagcaagaccaacgatcagaccaccatcttcagtccactcaatgtgacctgttttaagcaagtgtttgagcaaaacgcgataatcgtcttggctcacgttgtggaaatatgacaaagttaacacccgtgaagcaagttcagctggcgtcatttcaccgcttgaagccagcgtactcatcgtctgatgatagagcaaactatatggcaaacggttaggttcaggtggctccacccatttttcttccgcatacagttgtaccaaggcaatcccttgaagtagcggccacggaatcagttctggcaacatcgctcttgattcagggtgttcttcgcgcatgacaaagtgcatctctgatggattaccgcggcgccctgtccggcccattctttgtaaaaagccagacacagtaaatggcgcgtcaatctgaaaagcagattctagtttgccaatatcaattccaagttccagcgtagctgttgcacaagtcgtcatgtagacatcgtcatctttcattgcggcttctgcagtttcacgcaaggcttgagacaaattaccatggtgaataatgaagcggtctggctcatgattataggcacaatatgctctgagctcctgacaaacagcttcacattcttcacgactattggtaaaaacaagacactttttaccacgagtatgctcaaaaatatagccaattcctgggtcagctaattctggtgccttatcagttttcggttcgatttggctcggatcaaagtccctggaacttgcttgtggatttgttttataaaaatgttccatagataaatgccaaatctgtggttcattttgtacccttggtgtaacagtttttctgtttgaaccagcacccaaaaacttgctggcatcttctaaattaccaatagtagccgaaaggcctattctccgtggatttacattagctagttttgataaacgctcaattaaacaaaatgtttgtccaccacgatcacttctaagaaatgaatgaagttcatcaaccacaatatattttagaccaccaaaaagatgcggaatatccatgtgcttattgatcataaagctttcaagcgattccggcgtaatctgcaaaatacctgaaggatgcttgagtaacttgcgcttttgtgtttgagctacatccccatgccagcgccaaactggaatatccacatctgtgcataagtctatcagacgatcgtattggtcgttgatcaaagccttaagtggcgcaatatacagaacttttactgaatcttctggctcattataaatttccgacaagatcgggaaaaaggctgcttcagttttgcctgacgcagtcgaagccgacaatagcacattatgatcggtgttaaaaatttcttcggccgccgcaacctgaattggtcttaaacttttccagccatgttcatagatataatcttgaataaatggcgcataatgtgaaaaaacgtccatagtccatttccttaaatcttaaattcggtataatccttttccgcattatccgaaacagcctctgacttggtatagctgaattgatccgagttaagcagatcagtgatctttctatcaggattctgccaaacaatgtcgagcagctcaataaagtcacgaataatttcacgtggcgtgatattggtatccgctccaacacgggcatattcaatcttaataaattgagccaaatcatcatcagtaatcgtgcgctcataaccgtacaaattggcatgcatgtcagctagtttttcagtcaaaaccaacatttcttcagcggttaatggttcaagcttaattactggcgcatacatatcacgtgctccttcttgagcgaatttgcctgaagcaagtcggctgcgtaaagcttcgtatgaataaactccgcgacgacggtctttaactgcttgtggcgtaccacacataataatgcctaagtaccttgctttgccctgcaaggtatcgttgtacatggtcaaaatcttttcatagttgtactggcggctaattgcattcggaattttatagatattaaccaattcatcaatcataatcattaaaccagcatagcccgcttgtctaaagaaagtcgcaaataactttaaatattcataccaatcactatcactaataatgatatcaacgcctaattcctttttagcctcagtcttatggctatattctcctctgaaccacttgactactttagccttagtctcatcatcaccactcatataagcgtgatagtacatgttcagcaatttagcaaaatcaaatccatgaactaattcgtttaatgaagaaatgacgccatagattttctggtcaactgcttgctcaaatttaggatcatcattatttaagcctgtttcttgcgaaacttgcatctgcactgaattaatccagcgatctagaatcaaagtcaaggcaccgccttcaggcctagtcttagttgataagttctgaattaattcacggtatgttgctaaaccctgtccttttgatccttgcagccgacgttcaggtgataaatcaccatctacaacaacaaaatttttatccatcacatagttacggatcgtttgaagtaaaaagctttttcctgagccataacgacccacgataaaacgaaagcttgctccgccttcttgaataacatccacatcgtgtaatagggcctcaatctcggcctttctccccacggtaatataaggtaaccctattcttggcactaccccaccctttaatgaattaaggacagtttgcgcaattctttttggtactcttcttttttgtggcatgatttcatcccttcaaaaacatatcttttaagtcatctacataatcggtaattacttgtggttggtcctgttcgttattttctaaaaccacatcaccgaattcatcaaataatttttcattaatattatccatcaaaattgatgccattaaatggtgctgcttcaaataggtctgccaaggctgctgcatcagcaatgcagttaagaaaaacatttcattttcatctaagccatattcattatcaactttgacagtttcatctgcttgtttttctacttcttcttgcgcttctgcctgctctagctgcttttcctcatccgttaacaaactatcacgcgtcttcgaagcattggcccgaatttgatccaaatcggagaaatcaatcttaatctgatcaatctgcgcctttttttcttgaatgtgatattcagcaatccccgcgtcaattgccttaagtacagcttgatcaataaatcgcggcttaatcgaccgacctagtttaaattctgttcgcgccactctatctaattcatggagaaaattatttaaattaacccgctgacggttgatttgttgatcacaatgaatttgccattttccttggtaaaaatgatactttcttactgcatcaatctgatggtcagctacttgttgttgtcgcagataaaaaacactgcctacaaagattggcttttcaattatatcaggcttgcccacaaacgcactgtaatacgcaatgccgtattttttagcatccagcagctccagccacacgtaacgcaacagttgaacaaataacttttcattcttatacgcgtggtgctagttaaatcgttttagttaataaaaaagtccaatcttgttagactcgacttgtaaatagtaataatagaaaagagtctgatctgattgaactgccttaagcttaagcgttttagccaccatttacaagttagttttaaagatttagtgataatttgtcggcactggtatcgtttgtatgcaccggctgagtttactcatcggcgaaatattgatcaaattaaaactacggacagtctgattttggctttacttatctggcaagctaagacaggaattgaatcacaaagaagattctgtgaatgtttcaattgtttatcacactcacgttttaatcggcgttcacgtcagctattgcaattgatttatcagatacggcaagaaatgaataaaaaggttgacctgaatggacagttcttgatcattgacagctttccggtacctgtttgccaaccaattcgaaactatcgtgctaaaatttttcgcggttatgccaacattggttataaggccaccaagaaaatttacttctatggtttcaaagttcatgccattgttagcgatgacggttacattcttgattatgtcgtaacaaaggcatcagttcatgatgccagggagacagttgaactgatagaaaatacccatccatctaattactatcttcttggcgacgaaggctatttaggcaaagaactgcatcaacagctaaaacaaatgggttacgaactttggacaccatatcgtaaaaatatgacaggagctaaaaagcacaatgatcatcaattgatggctattcgcagaacaattgaaagcgacttttcgcttctgacctattacaatgccgagaacaatcgagcacgtagtctgataggctttcaaagccggttggaaattgcaattttagcttataatttggcttattgtctagaacgatttaactagcaccacgcgtattcttattaataactttagatgaattccaataagtcgttttctttgcaaagactgctgctaactcttgcgcagtaaatttttctggatggtgtaaaacctcataatcatgatcacgcttaatctcagatgcaaagcgctgcttaataatcttttcgtctaaatcataataaagaacataatctttgagccagtcttgtaaatatacatcaatactaatgtcaaattgtcgcacatatttttcttcaaattctaacagcttttcatatccatcttgtgcgtcatcaacaccaatattgttcagtaattcataaatataaacaaaggcataggatgtactcgttttttcaaaaacatgctggcgaatcttgctgcgccaagtaaagtaacttctaagctgcccagtattcatatcatgataagttggataaaaacgcttaaaggcaaaaaattcaggataatcatcatcatagtcggccatcatcctagcctgttgataaaaattcttagctcggccacgactgggcaaaatactgtagtcataaacttctagcatctttctaattctatctggaaccagactattgttatgcttcttgcgaagattttcacttggtttaattgcttgggcttgatagcggtcatctactttatctggtgcaatataaaaatattgattctgggcgatatttacttcatcaccattcatcgccagtttaaaagcaaaatcaagtgcttttttgagtgaatcttcactaactttttctaatattgccccaacccaatctgccgccttgatcttcattggatcagtgaagccaggcaaatctcttattagtgcagccattgcaccacatttcaggtccaatatactctgaccttgcccacgtgataatatcgcaaaataaccactatcaactggtgacattaaaacgtaaacgctagtggaacctggtacagcaggcttaaatttcaaaccatatttggcatagacatatttgaagagttgatttgaatccattttgtctcctttttttcgcacgtacgttcattatatcatcgatttattttttaccaaagtcacgcatgtcagctcctcatgtacatttttaagtttcataaattttatatttttatatttgtgtggttattaacaaacaattatgttactatagtttatgtaagttattgaaagcgtttttataaaagcttcctagagaggacaaaaacttaatatgagtacaaaagaacgttattctcaagatgaattaagaaaagataatccaatgtttagccgcactcgtgccactattgaaagtgcattttacggcaacaatgtccacgaagtaaccagtgttgcagaagcttataacttagctaagaagcaatcaggcgttattgttactgacttgccaatcttacacactaaggaattaggtttgccacatggcgcaacccaattggtttacaaccacggcaagattttaggtagaactgctagcgcccgtcactttgttgacaatcctaatgaagatgctgaagcattggacggcaacctacgtgaagatatttacaaggggcatgaacaaaagtacttaaaggctactgttttagtaggtcttgacccatcattcactgttaaggctcacattatgatgccagaagatcaagccttcaaccttctttcatacatcctcaacttccacttcttcgacgatgaagctgaaaaattatacgaaaagtcaaagttctacgatgaaccagacatttacttctacttcgatccaaatgttcaagacgaagattaccctaagggcttaggcgtgtttgacgctccacataactgtgccgctgtatttaaccttcgctacttcggtgaattgaagaagggtaccttaaccttagcttgggctatcgctcaccgtcacggctacactgcttgtcacggtggtgaaaagtcattccactttgacgataaagacgacaagacctttgcattctacggcttatcaggttcaggtaagtcaactttgactcacgaaatgtacgatggtaaatatgacatcactgttttacacgatgatgccttcattatttcacgtgaagacggttcttcagtagccttagagccttcatactttgacaagactcacgactacccagctggccaccacgagactaaatactacaccactattatgaactgtgatgtaactttagacaaagacggcaagaaagtcatcgtaactgaagacttacgtaacaacaacggtcgtgttatcaagacccgctacactagtcctcaccgtgtagactttgaaaagtcaccaattactgcattgttctggattatgaaggacggttcattacctccaatcatcaagatcgatgacccagtattggcaactactatgggttgtactttagcaaccaagcgtacttcagctgaaaacttacctaagggctttgacatgaatactttggttattgaaccattcgcagacccattcagagcttacccagtttcaggtgactacagagacttcaaggaattgttcactaagcgtggtgctagttgctacagcttgaacaccgacgcatttatgggtaaagacattcctaaggaagttactaagaagttaattgaagacttagctaacggcaatatcaaagacagtgacttcaagccatttggtaacttcaagggtgtatcatacttacctattgaaggctacgaagttcaccttgaagacccagaataccaaaagaccttgaaggatagaatgcaagatcgtttgaactggctcaacaagtacgatgaagaacacccagaaactccaattcaagatgaagctaagaagaccttggaagctatcatcaaggaattgagctaatattaaggaaatgaattagtgtctcattcaattaaaatttaatttcttaatgacgaaaagacgagagttgaaattcagctcccgtcttttttattgctcaatgtaattttgcttctgtagtttggcatctatcagtttataaacttgcactttattctcttgtgcaagttgtggattatagttatgtgctatttcaatgacaatagccggcaattggtagattatcttatgaatggcatcactatttttagggtctaaacttgaacaaatctcatcaagcaaatatatcttcttagaacgaattagacctctaactaaagcaagtcgttgtgcctgaccacctgataaattgttcgcgtcatctgaaattaatttatctaaaaaatcattgccaaactcatgaatcagtcccatcttttttgcttcatgaagcattagatcatcaggtatgttttgcagaagtgatagattctccctcactgtaccttggaataaccagattctttgcgagatcttgatgaaatcggcaggattaatttgatgaccagcaaaggtgatttcaccgttatacttcagattattagcaatacaattaattaatgtacttttcccaatgcctgaagccccagtaacaatgatcttgtcatgatcacgcaaagttaaatttataccatctaaaattttcttatcaccatatgaaaaagacaaatcttttattttcaaaatagcttgagagtcatgattatcttgtttaacactttcactttcttcaaaattatagctttttatttttctaattgcatcggtgctatgaatttgagtctgatacaaagcaattgttcttagatatcccacaaccctatcagctgacaaacttaaagttataatggccgctaccgttacgttaaaccagcctctctgcataaaaagcaagccaataaaaattggtagcaatagtgtaactaaagagattaaccatgcaatgaattgtacctggaattgacaattattcatcttacgatatttgtcttcctcattaaccaagattcgatcaaatcgtttaaagaaaagatgtctgacaccaaaattcagtatttctaagcgtccttcaaatatatccttcattgcctgaatcaactgtgagttagatttattccatttttcggttttctcattcatcctcttcttgccaatatagcttggaatcagggttagcgctgaaagaagcaaataaataattcccaaaatcagattagtttctacaacaactattgccgatgcaaccacattaaatacaaactgaactatgtcagttatcccaaagaaatatttttgttcaatttctttagcagtaccactaatcgaattgattacatctgctcctcttgcttgcttcatgtctgaattagcaaatttagaataaaaatattcttgctttaaagcaatatttaatagcatcacaattctattttgaaccaaataaaacaagagcatggctatgtagactatcagatatgcgccaaaggctaagccaataaatttataaacgtggtcaatgttactaaaattgatattagttaattgtccaaacagtacagcatttaataccccttcaaatgctgaaatggccgataaaaccagaaaaactatttgtaaatatattggaacatgttttactacccatttaaaatttatttgttgtgtgttcattgtttaatacccacatatttctcataatcaacaagccaatcttcatcatttttataagaatgattcatacactttttaaacccaattgctttaaatcatcttcatctttagtttctaacaattgtcgctcttctagagacaagtgatacttattcactaaggcatcaatattctccaaagaaatatttttaccatcagaaagatcctttcttcataccttcagacattactatacctcctattttctctcgttaagtaatgcataattttcaacttgcaatttactgtgtatgggattgatatcaatgcttcccataattccccaaatgcttataataataacagtaagtattctcttattttttaatttcaaagccaggaattcattatgtacggtcaaaaatttaaagcacttcgtcttcaacaacatatttcactagagcaagctgctaacagagttatctctccatcgactttatccagatgggagaataataagattgatattcgcttcaatttagttattaagcttttagacaatattcatataaacctaaaagagtttactaattactgcaaaattaatcatagtaatccatttgttgcgaaagtggctatgtactatgaagccaacgatgatcgtcatattttgcaattaatacaaagcaagaaaaaagaataccaaaattcacataatcaatttgatttacttctactagctatcgcatgtaattgttattacgatctaactgataacaatgttttcccagtgagctatcaaaagaaattattctacattttatctaacattgaatattggacagagatgtacatcaatgtttttggtaacactgtttttctctatgacagcaaggaactatatagtatttcaatcagaattcttaaaaatttaaattctaatacatttaatgattttcaagaatattattatgctttatcctctgtcatcaacgccctaaccgctctaattatcaaaaatcccaaattagcatcacagcttttaactaaaatagagaaagtttcaattcctaaaccaatctcttacttaaaaattagaactaatgtcctcaagtatcttttagattaccgtttaggcaaaacagatgaaaagcttatctcaattaagctagaaaatttaaagtggttaggattaacagatattgcaaaagacttaactttcttctttaaccgtataaaaaatgatcgttcacctctttcctaattcatttgcctattatattaccctcatttttatctaattgatttttctttgcaaatatgcaaaattatttttagcaagaataaaaaagcctattaaatctaggtgtttacaaaccctgatttaataggtcttttatgcgtcttttttattgctcaatgtaattttgcgccttagttaaaatatccatcttctcatgttcagttaaatacttttgtgcttctgccaaattgacccatttactagctaaaatttcttctttttgaatgttaacctcttgtcctgcaacatagctagcaacaaaataaactactgtcttagctttatcaacagtcaactgatattctgttttttctctaaaagtaaagtcaaaattcggctttaaaccaacttcttcaaaaacttctcttctagcagcttcctcagctgtctcattattttctaaatggccttttggaaagccccaattatgatttacgacgctctgcacgatcaaatatttcagctcgccgcttctacgttctctgtaaataactgcacctgcagaatgttccatcttcatttttgtcacccaacctttatattgcataattattaaatatttattaacgtatgtcaagcaattgtaatcaaaaaaatgaccagatctttgacgatctagtcactttattcgcagacgaaattattaagttctattggtagaatattttaagttacttcttcaagttcttttcgcagtattccttgaccttgtcatcatcggccttaagaatccattcaactgcagcctcagtcttcatggtgtctcgaccatttacttccatttcgtggtcccaaatagcgtcacgaataggcatttcattacccttagcccagtcaaaaacttgatccatatttctatcaattaatgcagtttcttcaatttcttttgcatctgccataattaaaagcttcctttctgataacgactttattgtagttctattagctacaactgttaacaaaaagggacttttttatttaaattctaatttttgccattaactgcttcatcagccttattcactacactaaccgcattaagtgaacgaggataaccaatgaatggtacgttttgttcaatgaccttcatcaagaattccttgtcattgcctaatttgatatttgcttgagcatgggccatcaattgaggttcacagccaccttgagctgcaatataacagaaggtaatcatttcacagtcattgtcatccaagccttttctagtgtagtaatcgccaaagcaattatcaactaaccacttattgattgttcccttcttggcaaaacccttcatttgtggaccaaacaagcgcatttgagtttcctcacccttttcaaggcgattgtctagtgtagtagttgcttgacccgcaagaggtaattcaacgccgcgcttagttaaaacatcattagtaatcttgaaaaatggggaaactctacccaaacctaaataatcaaccgcttgatataaacttccttagcttcaactgggttaacaccattgtctagtacgactggaagcattatttcatattcttccttgccttgcatccccaacaaataagctaaagttgacaacatcttagtccggtcgggcaaatcaacgtctttttgcacttcgtcaaaagcaaaatgattaattctttccaaagcttctggatcagtagccttcaataagttggcatgtactctttatgcatcttctttaattgacataataaattcctttctaaacgcttatctctactatttatttaagtacgattgagtctaaaagaaaaatatctattttttattctgcaatataacttattcttatcaaaaaaatatcctaaaggctttttgccttcaggatatttctattaggttatttaattagtttttcttgtctgcttcagcatcatggtatgacttaacgatttcatcaactaattctggatcatctttcaaatcagtagtttctacaatgacatccttcaagtcttcatctttaagcatttgcatcaacttaacgctttccttgtcgttaggttcatcaaagtgataaattctaccaacagtttccatcaatgcactgtagtccaaacctctgtccttcaattcacggattggacggataaatctttcattgtagcctaacttacggattggagttctaccaacacgagcaatatcatctgaaatatatgggttttggaatctgctcaaaatcttgttgtggtattcttccaaactttcttcggtgaattccttgttccacttgtggtaaagaagtgaacgggtttcactcaagacacgcttaacttgctttaaaacaaatggatccttaatagcatccccaatagtgtcatagccaaggctcttgccagtataagcaacagttgcgtgtcccgtgttaactgagaataactttctttcgatgtaaggttcaaggtctggtgcatagtcaacgccctttaacttgatatccttgttcttcatttggctttcgtcaataacccattccttgaagtcctcaactgagacaaacaatggatcgtcattatgttggataggaacaattctgtctacagctgcgttagggaagccaatgtacttgtctagttcaggcttaacgtcatcgtccaagtgcttataaacttcttcttttaagtgttctgaaccgccaatcatgttttcacaagcaatcacatcaagtggagtagtgttgcctgattgaattctagcagttaatcctttggcaattaatggagcaatgattgccaaaatctttggaccaatggcggtagttatcatatcggttgatttaattgcttcaactaccttgtctggatccttagcattgttaattccatcaacatttgaaacatgaattctcttcttaccaggtgcggctaattcaatgtcatattcaccacgcttgtttaattcatcaataatagtttcattaacatcaacgaagtcaatgccaaaaccattatctgctaaagtttcaccaataaatccacgaccaatattacctgcgccaaaatgtactgctctcatgtttaatctcctacgttctttaataaatcaataatttcttctggtgtttgtgcgtctgcaagctttgcaacgttggaaacatcactacagaaaatagcaatctgtgacaaaatatttaagtgttcattgttcaaaccagcaatcccaaagacaacggttaccaattgctcggtatcatccttagggtcactaaaatcaacgcccattggaatttggactaccgaaattccagtttttttaatgtgcttcttaccttcgtcagttccgtgagggatggcgatgaaattacccatataagtcgacacatcttcattacgggcaagcattgaatcaatatactctggttcgacacagccgccatcaactaataattgaccggccattctaattgcttgatcccgcgttggtacgtcttgattaagtttgatcatttttggatctaattgtaatgccatttagctcatccctttctaattcaacttttgaatagcttcgccaagctttttatctttaagtaaatcatcaacaactagggtttgaatatcactgtatctgacagccaagttcttattagcagctggagtaacaattactaagtgacttggatcatcagtcaattcgttgattcttactgccttaacaggagtagtcttaccagccttcttaattgcgtcattgaataaactagttgccatagtagcggtacctaagtgttgatcgtgacggatgaagtccacttctttaactttactgaagtcgattccttcaagtgaaccaaccttcttaactggtttttcagcctttggcttatcttctacttgagttaaagctttgaagctagctacgattgtgtcatatttcggactactcaagaagttgccaaccgccacgtgcattgcatgtggagtcttttgtaaagcgcggtcagctaattcttcttgcgtgatgatcaacaaaccatcttcatctttcaagtttctaacagcggtattggttactgaaaccttaatgccagccttcttgaatttatcacgcaaaagtgaagcacccatagcagatgaacccatacctgcgtcacaagcaaagataattttcttaacattggcatatgacttaactgattcatgtgcatcttcagcttccggcattgattgacctttagattgggccttcatggcttgcatttgggcttgttttgcttctaactcatcaccagtactcttgtcgtttttaagaataattgcggcaataatgaatgaaacaactgcggcgccaagaacaccaacaatattaccgaaataagcatcctttgcggaaacaagcaagatagctaaaattgaaccaggtgaagcagctgcttttaatccaccaccaagagtagtgaataagaaagtaccagtaacaccaccaccaatagcggctaaaatcaatgatggtttcattaatacatatgggaagcaaatttcatgaaccccaccaaagaattcaatgatggcagcaccaggagctgagctctttgacttacccttgccaaataaagtaaaggcaagcaagattccaagtcctggacctgggtttgattccattaagaacaaaactgacttaccaacttgtgcagcttgttggatacctaatggaactaagatcccgttaccaatagcgttgttcaagaacaaaactttggcaggttcaataatgatgttggctaatggtagtaagtgaactctaataattgcatttactcctgcactagcccattgactgccaacttccataatcggtccaatgataaagaaggcgaaaatcgcagcgatcatgcctagaataccaagtgaaaagttattgtagatcatttcaaaaccagatttaatcttgtcctggaatacttgatctagtttcttcaataaccatgcactaagcggacccataatcatggcacctaagaacattggttgatcagtaccaacaattacacctaatgtaccgattgcaccagcaatggcaccacgttcttcataaaccatgcgaccacctgtataaccaattaacagtggcaacaggtaatgaagcattggttgaactaagttattaatttctttgttagggaaccaaccgtgtggatacataaagaatgcagcggtaagtccccaagcgataatggcaccgatattcggcatgatcataccggataaagctgtaccaaatttttgaaccttcactttaacagaagatttactttttgcttgagccattttcttcttcctctctcatcaacttacatttttattctaagtcaatcagtaagcgcttacaatgaaatgaaaatagaactctggcacacttttgtgccagagtctgagtttacctattctattaagcttttgaactattggttacctagtaaccgatctttgaggtcttgtaaaaaaagtgccgcaattgcttctttaatttctttttgactgccatttgtaaataaatctaagttttgactagacatgataatcatgctggaaatagtactcattacccgctgttcgggtgcagtaagattgtctggtgccagcatcaaaagaactcttttgacttgaatggtatcatgatccattgattggagcgagatttcattatctaagtcaaacatggtaaatgaacagcgtgtaatttctggactacgtgtgtgtagcaatgcgatatggctgttagggatgccaactggtgccattcgtacacgtttgagaagatttttggcaacgggcatttgcttacgaattagtgttgaatccgaatgggctaaacattcctgaattactgcaattaagtcttgcgaattgtattccagttgttgaatcttgattccgttgactagctccgagcaaaataatgtactaatcgatagcttagcaagttgttcgactgaatggggatgtttttcttcaactacctgtttagctggaactggttgaggatatttttgttcataatcttttaagtaagcgcggatttttattaattcatcatcaagcagtaatggactaacaagtaaataatctcttgagaagcccttcaatctcaaggttgaaaaaataagattgtaatttgacaagtctatttgatttaaggcagaaacacggctggttttgacttctttgatttcagaaaattctctttttagtttggcacctaagattgccgacgttccaatgccattttcacaaattactagggccgataaattacgctgctgattgcgactcgtgtattcattggcaaaataaagcaagatcaactgcaactctgacgctgtcaaataattttctggaaacgctaaatgccaatatttttgaatagctagatataaatcaggaaacttttgactaaggcctgccagaatttcaataggtgtatctggtaaaagagctactttatgttgtactaaaccaataacgtgtttcgtcactttagtcataaaactatgatctttttgaaaatcccaatgcatttcttcagaaacgtgttgaacgaattcttttactttgactgagattgctaattcgcgctcattataagtcaagtaagtgttgtgataatcacatgataataacttattagctaagtatgagacatcattttggtcaacctcaacttgccgcttttgcgcaaacaaggccataaaacggtaaacataaccctgatatttaagtgaatcagcactggggtggataaaatctagcttgcatcccgccagagttctttttatcgttaccgcaaaagttaaaattaactcaatcagcttttggtcactgtctagcttaattttaccaaacacgctttttttaagacaatcagcaacctctactagcaaagccttatcaatcattgtcaaaaacatgtctttgcttgtcgtttcattatgcagatacttaaaaaagttatattcattgatctgattgagcataatatcaactaaaacctgacgccgtattttttcaggcgcctgaattaacagtcccacaccctttttgcggatcaagtcaatatgatatcgttttagcgacctttcaaccgtattcaaatcactttgaatcgttgcttcactgacattcaggtcaagcgcaaattgaataattttacatggctccgtacttaaaagcaacttagctgcaattatcttctctcttttagctaccgaaattacattttgactgtgagattgttgcacagattgcttaatttcttgtaattgctttgaatcgccagataaaaaatattttcctttttgattttcaattttaaagtcgttcttctttaaatcgccaaattcgcgataaaccgtccggcggctgatctttagactctcttcaatttgtttgatacttaccccactcggatttcccaacaaaatttgaagaatgtgcttttgccgttgtgttaaaaacatcccatcatcctcgcttacgtttaagtttattatacttgaacgcaaaaaaagaagacagatctcaaatctgccttcttgaggatatttatttacatattaattattcaacagtaacactcttagcaaggttacgtggcttgtcaacatccaaacccttatcctttgaagcgtagtaggcaagaagttgagttggaactactgtcaaaagtgctgacatgtagtaattaatttctggcaacacgatcgtgtcatcactatttgcgaattccttgcctacaatagtaattactgaagcaccacgtgaagcaacttcttgaatattaccacgagtaagatctgcagtaactggatcgttaatcaaggcaataactggagtgccatcttcgatcaaggaaatggtaccgtgcttaagttcagctgcagcaaagccttcagtttgaatgtatgaaacttccttcaacttcaaagcaccttcaagtgcaacagcgtgatcaataccacgaccaatgtagaatgcgtttcttgattttacaatatattgatcagctaattccttaagcttttctttaccgtcaacaatttgttggataccttcagcagcgatggctaaatcatgttgtaagtcccaatccttagcatcttgattaccaagtttttcaccaagtgccttagctaaaatagcttgtaaggcaacttgtgcagtgtaagccttagttgaagcaacggcaatttcaggacctgcacctaaaagcattgtgtagttagcttcacgtgataaagttgagccttcaacgttagtcatagtcaaacttggaataccacgcttgttagcttccttcaataccacgcgtgagtcagcagtttcacctgattgagtcaagaaaataaagaatgggtgcttgctcatcattgggaagtggtaaccagcttctgaagcgtaaccaacttcggtaggaataccagtgtagtgttcaaaaatagttttaccaactaaacctgcatgataactagtacctgcagcaaagatataaaggcgatcagccttagaaatagcatcaataatatcttgatctacctttggttcaccattttcgtcaaggtagttttgtgacatgtgacgcattacgcctggttgttcatcgatttcttttaacatgtagaattcgtaagtaccctttgaagctgcgttagggtcgatgttcaaaacgtgaggttcacggtctacctttttgccatcaacagtttcaatagtgtaagaatccttggtaatgtcaccaacatcaccatcttgcaagtcaacaaaagtcttagtttggtcaagaacagaaatagcatctgaagcaatgatgttaaagccatcaccgattcccagcatcattggtgacttgttcttagcaataaatacgtggtctggttctgtgttgtcaacaagcaagaaagcatatgaacccttaaccaacttcaaagcttccttaaatgctgaaaaagcgtctaagttcttatcacgtgcaattttaccgatcaattgaacaactacttcagtatcagtatctgagtggaacttaaccccttgcaagtacttttcctttaattctgtgtagttttcaatcacaccattgtgaactagatagaaacgcttggtttcatcaaaatgagggtgagcgttatctacagttggcttaccgtgggttgcccaacgagtatgaccaataccaactaaaccttgttcatctggagtcaacttttccttcaagttagaaatacgaccaacagccttagttaagtattcgttaccatttaaatcatttaagtaaatgccagctgaatcgtaaccacgatattccaagttggttaatccatttaaaataatatctcttgcaggcttacctacaactccgacaattccacacataattttctcctttggtctagtttgctttgaagtaatggactagcttatttttattgttacagtaggtataatagtctttttgcaaaaatcggtcaagtacaaatattcaaaattggtattataattttaagcataaaaaatggctaccagaatttgctccgatagccatttttacttaagtcaattttaacttttattacttgtttttgatacccttaccttcatagcagtctctcatcaattgagaaatttgactaattaatggagctgatgggttagtaacagtgttttggtcgccataagcttcaacagctaattggtccaccttcttgtcaaactcagccttatcaacgccataatccttgaaggccatcttaataccaactgattcagccaaatcaataattttctgaactaatttttcaattaattcagcatcacttgaaccagttaagccgattgctctagcaatttcagcatagtcgctttcagcacggtaaactgagtaatgtggccacatagcaagtttttctggacgcttagcattaaagcgaatgacttgtggcaaagcaattgcgtcactgacgccacttggaatatcaaaagttgaacctacggtatgagcaattgagtgttccaagccaaggaaggcatttgaataagccattccagcaatcgtagctgcatcatgcattctctttctagcatcaagatcgccatcgtaagacttcttcaagttagcgaaaattgctttaatagcttcaagtgaccaaccacgagtgaagtcagttgccatggttgaaacataactttcaattgcgtgacctaatgcttcaaaacctgaccaagcaattaaacgtttgggcagcgtttgcacaaattgatcatcaacaattgaaacatcaggtgttaaagcatagtcacataaggtatgtttaattccagttttggcatcggaaataatagcaattggggaaacttctgaaccggtacctgaagtagttggaatacatacaagttggacaccattaatctttgggaaacggactactctttttctaatgtctaagaatttttggtaagcctcttcaaaactcatttctgggttttcgtagaataagcgcattgctttagcagcgtccattactgaaccaccaccgatagcaattacaacgtctggcttgaagatgttcattctgtgaacaccatccttgatcacatcagtattaggatcaagagttacagccttaaagacttcatattctttttgacctaaacgcttagaaatgatatcagtaacttcatcagcaaagccttggtcagctacaccttcatcagttacgatgaagaaacggttaacgtttggcatgtgacgaaggtagttagcagcgttatgttcgaagtaagtctttgatggtacctttacccattgcatgttatcacggcgtctagccactgttttgatgtttaacaagtccttagcaccaatgttgtgtgagaaggtattggcaccatatgaaccagtacccaaggtaagtgatggcaacatattgttgtaaaggtcaccgataccaccgagtgcagctggtgagttgactaagatacggcaagcatccatcttcatggcaaattcatcaataatcttcttgtcatttgagtgaagaccagcggtgtgacctcgaccaccatagttcaataaatcggtacaaatcttaaatgcatcgtcatggttcttagcacggtacaaagtgaagactggtgaaagcttttcagctgatagtgggaagtttctacctacgcctttatattcagcgataattactttagttgtctttggcacatccacaccacaaagcttggcaatttcataagctgacttaccagctactggaccagcaaccgtaccacgacgaggatcaataaagtgttcctcaaacttcttaatttctcctttgtttaagaagtagcagttccacttcttaaattcttctttaactttgtcataaatttcagtatcaacgacaactgaattttcagaagcacaaaccataccgttatcaaagttctttgataaaacaatgtcataaactgcacggtcaatattagcagtcttttcaatgtaagaaggaccattaccaggaccaacaccaatagctggcttgcctgatgaataagcagctttaaccatacctggaccaccagttgccaaaatagtttgaacacctgggttagtcatcaaatcggtcgttgcatcaaggcttggttcttcaatccattgaacggcatccgcaggagcacctgcagcaacagcagccgcacgaatgattttaccagtttctacacaacatttttgagcctgtgggtggaaaccaaagataatggtatttctcgtcttcaaagcaagcattgccttgaaaataacagttgaagttgggttagttactggagtaacacctgcaataacacctttaggttcagcaatcttagtcaaacctaattccttgtcttcttcaatatacgccgacggtcttttcgtgacgcaaactgttccagatattttctgaagcatacatattcttggtagttttatcttcaactacaccacgtttagtttcttcaacagccattttagctagtgggtaagcattttgttcacctgcagtagcaactgcttcacagatcttatcaacttgttcttgtgtgaagttagccatttgatctaaagcgacatgtgatttctttactaagttatcgaccatgtcgtagatttgctttttcttttcgtcctctgtaagagtctctttttgttgtgtcttagccattgtattattacctctaagatctactaattcttgtgaactaatttacaatgtcaactatagcacaataactttatttgtaaatgcatgaatttatgaaaatagtgaattaacaaagattcacatttcctcataatttcgctctaatgcaaatgaaagctattccttaattatttgtttgtgaattaacaaacttatttttaaaaaacagatttttgatatttttttaaatctaactatagagtctggtcatactaattgataatgataaaatattaagtatatgtgaaaagattgagaacattggggggcttatatgagtgagaaaaaaacacagaccgcttctggttataaacgaaccctaagcaatgcacacattcagttaattgctttaggtggaacaattgggaccggcctttttctgggggttggagacagtattcaccgcgccggtcctagcgttatcctgatatatattattgtcggtatcttcctcttcctgctaatgcgggcactgggagaactaattatgtccgacttgaacaagcacacatatattgattttattgaacaatatttgggtaaaaatattggctttatcacaggctatttgtattggttaagttggattaccttgggtatggccgaaaccacggccctaggaatttacttcaagtattggtttccaacactgaaaccttggattccaggaattattaccattgtgatcttgctgttaatcaatttaatttcagctcgtgtctttggcaacttggaattcagttttgccattatcaaaattgtcacgattattgccttcgtcatcttgatcctttacttactagtaactggtggcaaaaccagctttggtcctgttagctttgctaaccttgacgatcatggcggcttcttcgcccgtggcagtaaaggattcttacaaggatttcaaatggtaatcttcagctttattggagttgaattaattggtttaaccgcggctgaagcacaaaagccagagacaacgttgaagcgagcaatcaatcaattaccaattcgaattattttgttctatgtcatggctattttaggaattttgttagtaattccatggtccaaagttgctactaacgctagtccatttgttgaggccttaggtgctactggtattaaaaatgctagttctattattaattttgtagttatttcagccgccgtctcatcaactaacagttttttgtatagtgctggtcgattacttttctctgttacttttgacggtaaaggaaaatggaataaaacttttggacatttatcaagaaggcagcttccacaaaatgcattgactttatccgcattattgatgggatgtgcaccactaatcaccttggttattggcgatcaggcctttaattttatctcatcaacttcaactagtatgtttttaatcatctggagtttgatgattttaactcacatggcttacaggagaaaaacagcagctaatcagctaaacgattttcaaatgccaggttacccttatatcgattatgtaatcttgtcattcttcgttttaatgattatcctgctattgattttaccaagctaccgagtaccaatggtcgctgcaattgcaatctttattgttttatacatcattttcaaaatttggagtaatgaaaaagctgtttaaagcaaaaagtcgagttttttagctcgaccttttattttgcaatttttttaattattttagcaggatttccggcaactaccgtattagctggcacatctttggttacaacggcattagccgctacaacggcgtttttacctaccgtaacgccaggcaatatcgttgctttagcgccaatccaggcgttttgtttgataacaactggctttaattccagttcttttctatgctgtggatccagcttgtgattaactgaaatcaggtaggctccaggcccaatcaacacatcgttctcaattgtaatcccgcctaagtcgaccatcatcacattggcattaataaacacgcgctcgcctaatttgatgttgtgcccataatcagaataaaatggtaaccgaatctctatactagcagctattttttgaccaattatttcactaatcaattgtctaacttcacagctacaatgccgttgtgtatttaaattctgcaataatcgctgattctgttgggctagttttcgacgtaaatcgtgatcttctgtttccattattaccactcctttttcttgctctacttcagtttaaagggtaagcttatcaatgtgcaaagcttataaggtatgaagtataataacaattgtttataggtgatttaaatggaattacgtgttttaaattattttgtcgctacagcgcaagaattaaatatgacgcgagctgcacaaaaactattagtctcacaacctgctttatcgcgtcagatagcagatttagaggatgaattaggcgttaagttattcaaccgccagccgcggcacttaaccttaactcctgcaggacagtatttatatgaacaagcaaaagaaattcttactttagcttccaaaaccaagagtaacctacaatctagtgctgtcatcagtggtgacctaactattgctgccggcgaaagttttgccatgcaacgtctaatgaatatcgtcagcaacattattcgggattatcctacagttaaaattcatattctaagtggcgattatgaatttgcagaaaggcgtttagatacaggtgcagttgattttgccgtaatcattggtaatctacctttagataattatgcttctctgcagctccctgagaaggatacatggggcgttttaatgactaaggatgatcctctagcaaaaaagagtgctattacagctgaagatttagttggacgaaacgtcttaaattcacaacaagccgaaaatcgaaagtactttgattcatggttcggtaattataaagagcaaattaatatcatcggtactgttaacttgaatttcaacggtacacttttagttaaaaataaagcagctattatgctcacactcgataagctagccaatatatcagatgaatccaatctaacttttagaccaattactccaatgttaaaacagccggtaacagtaatttggaagcgagaaaccaataaatcacctgtagctgatttattcctaaatcgtttacgagcatcaattgatgacgattaacaaaaataacctagatcgaattgatctaggttattttttactttatttctttttacgactaaaacgttgcttcaatcgttgccataagcttaatgccctgcgcatatgatcagctggtacatattttcttattgctcgcaatacctttttggaatcacgtgccgcaaaaacaaatttaccatttgacttagttctgatttcaaaacgcggaatataacgtccaccaaagcggacatctgcaaccacataagttacttcattccaaggaatctgaacataatcttcaacgtttcgttcgttataaaattcaaaagctctatcgccgatcatgattttgccgtatgatgcaattcctctaaaccaggttgcatcaacagtgagatcgacttttgtattaattgacttagccatttattaaagaatgccccatacgtggaagagaacaccgacaacgaagataccgatgataatccagattggtgaaactttcttcttcaataaccacatacagaagaaagttaagagcaaaccagctaaaccaggaattaattggttcaagttgtcttgtaaagtagtaactttagtactgcttaaagctttaccgttacccatatcccattgttgaagagcggattggatacctttagcacctgatggaagcttgtcccattcgatgtaaccacccttttgaataggagtttgagaaacaattggagtgaacttgatgtttacccaacgttcaattaaggcacccaagacgaacatacccatcattgaagcaccacgggtaaccttttgaagcataccacctgacatatcactggtgatagctgaaccagccttgtaaccaaattcttgtgtgtaccataagaatgcgattctgataatattccagataacgaagaacaagataggacccattacgttacctgcaatggccattgatgcacctaatgcaccaacaattggacgaacagtgtaccagaatacagggtcaccaacaccggccaaaggtcccatcataccaaccttaacaccttggatagcgtcatcagtaacttctgcaccgttagccttatcttcttccaaagccaaggtaacaccaagaacaggtgatgctaagtatgggtgagtgttaaaaaatactaagtgtctttgtaaggcagcagataaatctttcttgtttgggtataactttctcaatgctggaatcattgaataagcgtaaccaccgttttgcattctttcatagttccatgaaccctgaaggaattgtgagtgccacataacgttaaaacggtcgcgcttggttaatttagttttcttatcagccattatataaatcctcctctatgcgttcattttaatagtcatcaatgatatcgccgagtggatcgccagtgccggcatcgccagaattattgtttccaccgttgccacccttagcttcaagagctaagtacatcaaagccattgaaaggccaatagcaccaagggcgatcaaagttaagtctttgatagcagcaagggcaaaaccaattgcgaagaatggccatacttccttacttgccatcatgttaataaccatagcgtaacctacggctacaaccatcgcaccaccgatagtcataccttcgtttaaccattgtggcatcattgcaagccaacttctaacagtacctgaagggattgctaaaagaagtgcagctgggatagcaattctcaaaccttgtaaacatacggcaatccattgccataagttgatcatacgccagttacccttcttagcttctgcgtccatgatgtgaacgatagcagttgaaatagtacgtacgatcatagttaagaacaaaccagcaacagctaatgggatagcgataccagtagcagtaccaatacccttaataccttgaccaccttcgatcaagataatagctgaagctactgatgctaaggcagcatctggtgcaacagcggcaccaatgttagcccaacctaaagcgatcatttgtaatgaaccacctaaggcaacacctaaatccaagtgaccggttactaaaccgatcaaagtacaagcaactaatggttggtggaattgccattcatccaagataccttccataccggcaagaaaggcaacaaacacaaccaaaatcatttgaatagcgttcatttatttactcctaattatttattactttttttcgtcaagtaaagtttgagccttcttcaagatagcatccatattacctggagcatctgaaggaacttttcttacatcaaacttaacgcccatcttttcaagttcacggaatgtatcaacgtctttttgattcattgataatacgttgttggcgttaacatcgccttccttatatgacattgaaccaacgttgatattcttaagatcaataccgcctttgatagccctcaatacatcttctggattttcaaacaaaagaagtgcatgagtgtttccaaatcttggatctttagcaatttcttgcatcttcttgagtggaacagtatgagccttaacacctgctggtgcagcttcacgaatcatactcttacgtaaatcatccttagctacactatctgaaacaacaattactctatcaggcttcatagctggaatccaaccagttgccacttgaccgtgaagcaaacgtgaatcaattcttgccaaaacgtacttgatatgaccatcaccaataacagtaccttctggaatgctcttcttactgcccttagcagcagctttgtcagctactggagctgcagcagccgtcttaggcattaagtcagctggcttagtcttaattccatctctaccaggttgaacaactgcagtggcgatgtgctttgcagttgcattagcatccatcattctctcagtcaatgcttgtacaaccattggtaaattcataccagcaacaattgcccatttatcatgcttttcagcaagtccatttgcttggttaaatggagtaccaccccataagtcaaccaagaacaaaacttcatcttggttatcaaatgaagcaattgctttttccattttgccacgaatgtcatctggaccttcatcaggctttaagataacatgtgcaaaattatcttgttcaccgaaaagcatttgtgcagattgtgcaataccatcggcaaagccaccatggctggctaaaacaattcctaccatgtaatttcctcctctagatcaaaaaatgaatccgcttttattatacgataaatatagactttaaaaaagtgttttttgaaaataatttcataaagtgccaatttgtttcaagcagtccaaatgccttgtctcccaagcaaagacagaaattagtctaataaaaaaagaaagcctgttttcatgatttgagtcgtttttcacaaatttggcttcctattaaaatatatgctggttggataatttcattttcataaaataacaaaaaaggaagccttccgcttccttctcccctttactccggctgtcagactcgaactgacgacatcttgattaacagtcaagcgctctaccaactgagctaagccggaatattaaaaaagagcacggcagcttcctttcctcgcaggcagttgcccaccaactactttcggcgttaagaagcttaacttctgtgttcggcatgggaacaggtgtatccttcttgctttcgccaccgtactcttttgagcttttacactcaaaactaaacataatccttctcgcaaaaaaccttccagtttgcttcgctttggtcaagtcctcgactgattagtactggtccgctccatccttcacaggacttccactcccagcctatctacctcatcgtctctgaggtgtcttactgcttacgcaaaggaaatctcatcttgaggggggcttcgcacttagatgctttcagcgcttatcccttccgcacatagctacccagcgatgctcctggcggaacaactggtacaccagcggtgcgtccatcccggtcctctcgtactaaggacagctcctctcaaatttcctacgcccacgacggatagggaccgaactgtctcacgacgttctgaacccagctcgcgtgccgctttaatgggcgaacagcccaacccttgggaccgacttcagccccaggatgcgacgagccgacatcgaggtgccaaacctccccgtcgatgtgaactcttgggggagataagcctgttatccccagggtagcttttatccgttgagtgatggcccttccatacggtaccaccagatcactaagtcctagtttcctacctgctcgagttgtctctctcgcagtcaagctcccttatacctttacactctgcgaatgatttccaaccattctgagggaacctttgagcgcctccgttacactttaggaggcgaccgccccagtcaaactgcccacctgacactgtccctggcctggcttacaggtcgaggttagagcatccttcaaacaagggtagtatcccaacattgcctccaataagactagcgtcctatcttctctggctcctacctatcctgtacatgtttaaaagatactcaatatcaagctacagtgaagctccatggggtctttccgtcctgtcgcgggtaacccgcatcttcacgggtattataatttcaccgagtctctcgttgagacagtgcccaaatcattacacctttcgtgcaggtcggaacttacccgacaaggaatttcgctaccttaggaccgttatagttacggccgccgtttactggggcttcaattcaaaccttcgcttacgctaagctctcctcttaaccttccagcaccgggcaggtgtcagcctctatacgtcatcttacgattttgcagagacctgtgtttttgataaacagttgtttgggcctattcactgcggctaaccaatctcttggctagcaccccttcttccgaagttacggggtcattttgccgagttccttaacgagagttctctcgctcaccttagtgttctccactcgactacctgtgtcggtttgcggtacgggtatgtcatctctggctagaagcttttcttggcagtgtgattaccacaccttcgctacttttaattcactcctcttcacaactcgtgttgctggttagaagcatttgactcttaaccgcacttgttgcttgaacatcgttccatcgcgatgcgtgcttcacctcctgcgtccctccttcgctcttaacgatttgacacagtacaggaatctctacctgttatccatcgactacgcctctcggccttgccttaggtcccgacttaccctgggcggacgagcctgccccaggaaaccttagtctttcggcggataggattctcacctatctttcgctactcataccggcattctcacttctaagcgctccattgatcctctcgattcaacttctccgctcttagaacgctctcctaccacgtgctctttaaaacacatccacagtttcggtactatgcttagccccggtaaattttcggcgcagcgccactcgactagtgagctattacgcactctttgaatgatggctgcttctgagccaacgtcctagttgtctacgcaactccacatccttttccacttagcatagatttggggaccttaactggtgatctgggctgtttccctttcgactacggatcttatcactcgcagtctgactcccgtgtatggatatctggaattcgtagtttatctggattcagtaacccctgacgggcccctagtccaaacagagctctacctccattatcctctccacgaggctagccctaaagctatttcggagagaaccagctatctccaagttcgtttggaatttcaccgctacccacaactcatccccgcaatttttaacttacgtgggttcggccctccagtgcgttttaccacaccttcagcctggtcatgggtaggtcacttggtttcgggtctacgtcacctaacttttcgccctattaagactcgctttcgctccggctccgtcttttctgacttaacctcgctagataacgtaactcgccggttcattctacaaaaggcacgccattgcactttaatgtgctttgactacttgtagacacacggtttcaggttctttttcactccccttccggggttcttttcacctttccctcacggtactggttcactatcggtcactaactagtatttagccttgcgagatggtcctcgcggtttcaaccgggattcctcgtgtcccggcctactcaggattctgctaggcgtgcttgagatttcgcttacggggctctcaccctctctggcttaccttcccagataattcaactatctcttacactgccacgtcgcagtcctacaaccccaaatgataaatcacttggtttgggctctttcctcttcgctcgccgctactaaggaaatcgatctttctttctcttcctgcagctacttagatgtttcagttcactgcgtcttcctttgattagctatctattcactaatcaataatgcatctctgcattgggttcccccattcggatatctccggatcactgcgtacttaccgctccccgaagcttttcgtagttcgtcacgtccttcttcggctgttagtgcctaggcattcaccgtgcgcccttttctacttgaccttactcaagaattctcttctcggtcgctctacaatctgttctctttgattgtctcggttttttgcttggattatattcagttttcaatgtactagctctttttgaggtactaccctcaaaactaaacaaagtttctcagtgtgcttccgcttgctctggatacttctcttagcattcctgctctccatatccttcgcttccttagaaaggaggtgatccagccgcaggttctcctacggctaccttgttacgacttcaccccagtcatctgccctgccttagacggctccttcccgaaggttaggccaccggctttgggcattgcagactcccatggtgtgacgggcggtgtgtacaaggcccgggaacgtattcaccgcggcgtgctgatccgcgattactagcgattccagcttcgtgcagtcgagttgcagactgcagtccgaactgagaacagctttcagagattcgcttgccttcgcaggctcgcttctcgttgtactgcccattgtagcacgtgtgtagcccaggtcataaggggcatgatgacttgacgtcatccccaccttcctccggtttgtcaccggcagtctcattagagtgcccaacttaatgctggcaactaataacaagggttgcgctcgttgcgggacttaacccaacatctcacgacacgagctgacgacagccatgcaccacctgtcttagcgtccccgaagggaactttgtatctctacaaatggcactagatgtcaagacctggtaaggttcttcgcgttgcttcgaattaaaccacatgctccaccgcttgtgcgggcccccgtcaattcctttgagtttcaaccttgcggtcgtactccccaggcggagtgcttaatgcgttagctgcagcactgagaggcggaaacctcccaacacttagcactcatcgtttacggcatggactaccagggtatctaatcctgttcgctacccatgctttcgagcctcagcgtcagttgcagaccagagagccgccttcgccactggtgttcttccatatatctacgcattccaccgctacacatggagttccactctcctcttctgcactcaagaaaaacagtttccgatgcagttcctcggttaagccgagggctttcacatcagacttattcttccgcctgcgctcgctttacgcccaataaatccggacaacgcttgccacctacgtattaccgcggctgctggcacgtagttagccgtgactttctggttgattaccgtcaaataaaggccagttactacctctatccttcttcaccaacaacagagctttacgatccgaaaaccttcttcactcacgcggcgttgctccatcagacttgcgtccattgtggaagattccctactgctgcctcccgtaggagtttgggccgtgtctcagtcccaatgtggccgatcagtctctcaactcggctatgcatcatcgccttggtaagcctttaccttaccaactagctaatgcaccgcggggccatcccatagcgacagcttacgccgccttttaaaagctgatcatgcgatctgctttcttatccggtattagcacctgtttccaagtggtatcccagactatggggcaggttccccacgtgttactcacccatccgccgctcgctttcctaacgtcattaccgaagtaaatctgttagttccgctcgctcgacttgcatgtattaggcacgccgccagcgttcgtcctgagccaggatcaaactctcattttaaaaagtttgaatgattgctcattccttatttaagatctttgtctcaaatttattgctcgcgaattgacttcgcttcttgtttgggtttttacacccgcacacttttagcgaaactttgttcagttttcaaagtactacctctgtcttgcttttttgcaaagcagacagctttcatattttatcaaaccatcatttctttgtcaagaacttttttgatttgttttttcgtcttactcaagctttttctgctttcacctgacgacatttaaatatattaccagcttatttacttctttgcaagtactttttttctttttatttgttttctttccttgcatgtctgtttttaagctctcgtcgcatctctcgaagcgactttattaatttaccttattttctccgctttggcaagtcttgctcttcgttcgcaatcttttagaaacgcttggacgcgctgtaattatttctttatttctatttcaatctacctttttctttttgcttactttatttttatccttacgcttattattcgagttttactgttttttctcttaattttagtacaaaatttttcgaaattttttcaaaataattcaaaaaacagtgttttgcctaatttttcactcaaaaatgcaaaaaaagacgtttatcaaattgatatagtcctactttagtagacagtacaaatatataaaattgtactatctatgaaagcaggactttttgtatgtctagaaaaagtaaatttagctatgaagctaagcttaaagcagttaaacaatacataagtggcgaagcatcacctgcttcaattgcgaaagttttaggggctggcaagactacactgcgccaatgggtatatgcatttaaagatcatgggccagaagcattaagaccacataaatataatcaaagatacagtaaagattttaaactcaaatgcatagctgcctatttaaatggcgaaggctcatatgattatctaacaaataagtttggtttgcgaagtgctgcacagttaaagcagtgggttatcaagtataatagtcatcaagaactcaaggactacaatcctattctggaggcttatatgactaagagaaaaaagacaaccctagaagaacgtaaacagatagtgaaatactgcaaggatcatcaatggaactacaaggaagcagctcttaaatttggctgcagctatgcccaagtatacaactggtcaaaaaaatacagcgcaaagggaactgacggcttagcagataggcgcggtcatcgtttaaaagaagctgagctatctgaaactcaaaggctaaagcgtgaaattgaacagcttaaaaaagaaaatgatattaaagaccaagagatagccttcctaaaaaaagtgaaggaattagaaaggatgtgtttgctggacagccaaaacaaagacaaatagcacttaaacaacagcagcgaaattctctttacagtttgatcaaagaatgtcaccgagaatataagtggtcaattgaatggatgtgcaaacaagccaatattgcccggtcagcctactacaaatggcttaatcataagccaagcaaacgtgaactaagagatcaaaagattcttaagcgtattaaagaaatagctgagagcaataacagcctctttggttctcctaagatgactttggctttaaacaatgagctagcagacggtgaggccaaaatataccgtagaactgtggctcgcttgatgtgcgtgaatggcatctatactagcaaggccagatttaataagaggtatcgctatcaagctgctagaccggaagaaactgccgaaaatctattgcatagagacttcaatgccactaaacccaatgaaaaatggtgcactgacattactgaagaaaaaattcctggaacaagtcaaaagatttatctctgtactatctttgatctatatgatcgtttccctgttggctatgctttaagcaagcgcaatgatacagccctagttaacgctgctctgtcaactgcttggaaaagagagcccaatagtcatgcaatgcttcatagtgatcgaggatttcaatttaccaggatgccttttaagcatgagctagaagaacatggcatgccacaatcaatgtctagaattggccgctgtattgataatggcccaatggaaggctggcaaggtttaattaaagaaatgcgagaagttctttatccgaaggcaaatagctatgaagagatggaaaaagcctttaaagcaagtattgaatactatacgcgtggtgctagttaaatcgttctagacaatatgtcatattataagctaaaatagctatttctagccgttgttgaaaacctactaagctcctggctcgattattctcagcattgtaatagctaagcaaagaaaagtcgctttcgattgttcttctaattgccattaactgatgatcattatgctttttagcacccctcatgtttttacgatatggtgtccaaagcacgtatcccatacgctttagcttggctgctaagtcttttcctaaatagccttcatctcctaaaagataatggttaattggatgagcattgatcatcaattctaccgtctcttttgcatcatgtaccgacgccttagtaactgcgtagtcaagcagatagccatcatcactcactattgcgtggactttgaagccataatagtagatttttttcgtcgctttataaccaatatcggctatgccacggaagatcttaacgtgataattgcgaacaggctgacaaactggaatcggaaaactgtcgataatcaataattctccacctacctttacttcctgattccaaccctgacggatacaacgaattagaggcaagagcattcgagctcgacggttaaaacgagaatgagataagccaacgaagaatttacagaatcttcgttgagattcaattccaatttcagtttgccaaatgagcatcgctaagatagaactatcaggaagcttggtctgatcaacatttttacgatgtttaagtccatcaggcgcataaagcttatacagcgagcgacaaatcacatttaaccgattaaaactaacttgtaaatggtgagaaaaacgattaagcttgagatagttcaattagatcagactcttttctatttaaattacttacaacttgagtctagtctaattggacttttttattaactaaaacgatttaactagcaccacgcgtaatactatattaattatgatcctcaggagcgcttcaatggcaagagcgcaggtcaggttagaaaagaagctaagaataatccagagaatataatttcatatccaataaaacaagataaaagatataaagacttttggaaaaagattgatgaaaagaaaaatcagctcgcacaatagcgaactgattaatcaaattaatttatatatttaagctgtctacttgacacggtacggatcaaatataatcattcgataaacgtctcattttatatctttagatgatcaatctttagtgtctattcatcttttttcttacgtttttcaacgccaagtaaactaatccaacctaaaccagcgagtaatgtaccaatcaaacctagtgtgtgtttgtgttcactaccagtttgaggcaataaatcttgcacggacttcggttttgcatttaatttgttagctaattgctttctttctgttttccctattgtcctcttgccagattcaatgtctgctgccttaactgggccgttagcgcgtttctttcgacctgtaggcataccttcatgcttaggattgttattagagtcatagcccttcttatttgctttagaatgattatgcttcttttcactttccttatttggctttgccggtttatctggcttcggctctggatttggttttggcttcggttgaggttctggttccggagtaggtacttcatcttgcttgtaagtaattttaatattactgtcagccgtatctactgaaaccttttccgctgccaccttactttgtgaagcagtgtagccactaaatgttggagcagtatatgcatcccactgagtattaccatctaccctccactcactgtatgtaactttgccagtaactttatcaaacgttactttttgcgtggtaatcagcttaccacctgaaggcgtaatgactgtaattattctagttggagtcttagtaaaagtatccaagtgatcatagttcttacttggatcaccttgcactgggcctgttggaacatcccttggtggagtttctggagtaacgataatggtgtcgtgttcaacccttacagttacagttggaatgccatcagcagttgcaactactgtcttagaaatatcctgtcctgaaacaatcttccatcctgctagagcttgtggatttacatctactgtttcactgatcttgccactaagcggagtttgccctacttctttgccatcactatcaacgtaagaaatcttccccgtttgagtgttgacagtataagtagcagtgacttcactattggcaaccagctttccagtaaccaagtcatatacggcagtccgcgtaaattcaacggtctgtttcttttgatcttctgaaatctgagctagttggcaattcttgatctggtgctaactcgtagttctctggaagcttcaaatcaaggttatcaacagttgagccagcaacgccagacttagtaattgtctgaccaacttgcttgttaccttcttgagtatcttcaaattcaatagttaaagttgcatccaaagtaaacttagcctttgaagaaatattcagcttgtagtttggatttgctttttcaagggcagtaatactttctggagttaagttaattacataaacgccagattcagctggaattccatttgcaaattcataagtcaaacctgccggaactgtaatagcagttggaacattaactttaaagtttgttccatcaattactggtacagtgctttcttgactaccagaaatcgttacattttcttcagctggactaattacataagtgaattgaccactttcagaaactgcatagttaggattatcatcttgcaatttcttcaatcccttagcagttaaggcaatgtagtaagtaccggcatttgttggcgcagaaattggcttaccattggcatcgacccattcataatcaccagctgctaggttagcagtattcaacatttcaccgcttactaaaccagttggagtgaatacaccgaagttggtagcttgagtgttaatcgttgcaggttgaccatcgtacgtcttgccatctgcgcccttactattaccgtcaagaactacattaagatccttttgtttaattgtgtaagtggcagagcctagcaggtcttcagcatccaaggtgacatttccttgaccagcgtattggttaagggctttttgcaagttaacaataccattggcactcagcttaatcgtgtaagtaccatcattaactggtgcgctgccagcattccaaatataatcaccgtcttgcagagcatacgtactttcggtagttgaacctgggaaagtaaagtgaactaaaatttgaccattgctgttaacttgtgcagttgttacagctgtaccatcaaatgtcttttggttagagccattaagttttgcgtcagcagtggctgcagtaactatgtagttagctgttgtcttaaatgtccacttgtagttagcaccattattaccagttagttgcttaagcttttcttgaccagcctgtgacaatttaacttggtaagtaccgacattcgttgcattaccaacaatttgcaaatcgtcagcagttaacttaagtgtctgagcttcaccatcagcggagtaaaccgtcgcatcgtaggttacgttgtacttattcaagttaagtccacttggtaaggtttgcttagcatcataagtcttgctgtcaccactattcagggtaacagtagcttcgccctggttaatgtacccttagtagttacatcagctgctacttgtgggtatgcgtagttagtacccaaagctttttcaatgttagccaacccttgcgcagataattccacgtggtattcaccgacattgcctggggtttgatcaaagatcaagtcaccatctttagcagtgtagcttaaattagtactattagtactatttttaccatacgtatatttacaacaacataatctttgcctggatcaggaacattaacttgccaagtttgtccagcttctttaggtagactccatgaaccagaaatcactttaaatcctggcgttgttgaatcacctgctgtttgatcccattgccaattaccataagtaatcgtgttattagcaacatttaaactaccagtctgggcatagaatacctgtatttgtgaatcaggtgcaaattgttgaccatttttgtcaccaccagcaattacatatttagccgttactgttctcgcttgctgttttactggaatatacaaaacagtgtgaactggacgggcttcataaactgaggcgttctcagtatatgctagagactccttaccctcactagatgtatcttccttattccaagttgggtaaacaaattggtttgctgacctggatcgccgctcttattgtaagcactataagaaacttccttattattttgagtagaaacatctttagtatcttctagactagtagcttttttatcttctgcctgtttagttgaattctgctcggttgaatttttgctagtcaaaggatcggtaccgctaacttctttttgagcagtagtatcgttatcattcttaccagctgtcgtagtctgatcatttccagtatctgtggtagtcttcttagccgactcaacctcttctgtttctactggatccgtagtatccgcatgaaccgtttgacttgtattcatcgtccaaagcaaagttgaaagcaaaacggaacaaactccaatgttcaattttctaatactaaagcgctgcttgccttcaaagtcatttttatttagtctttctattacgcggttttattctattcatctattttaacgcctaacataaatcacaacaaaaagcaggcttaaattatatgcaaaaaaatcgttattttaagttgtcagtcacaacaactaaaataacgattttgcttttttaatctttaattacttaaattaaacctgattccttagtaatcttcttcataccattcatgtaaggaacaagtacatcaggaacagttactgaaccatcttcgttttggtaattttccaaaatagcagctacacaacgaccaacagccaaacctgagccatttaaagtgtgtgccaagtgaagcttgccgtcttcatcacggtaacgaatttgtgcacggcgagcttggaagtcagtacagtttgaacaacttgagatttcacggtacttgtcttgtgcaggcatccaaacttcaaggtcgtaagtcttagcactagtaaaacttgcatccccagttgaaagagcaactacgtgatatggcaagcccaacttttgcaataagtgttccgcattatgagttaacttctcgagttcatcccatgattcgtcaggcttacataccttaaccatctcaaccttacggaattcgtgcattctgatcaaaccacgagtgtcccgtcctgctgaacctgcttcacttctgaatgctggtgacaatgcagtaacattgattggcaacttgttttcatgaataatttcatttctgaagtagtttaccaatggaacttcagcagttgggatcaaagttaagtcacgtggcttatctggatcgtcattatcaacgatggtataaacatcttcgtggaacttagggaattgaccagttccttgcattgatgcatcgtttaccaagtatggtgggataatttcggtataaccttccttagtgttttcatcaaggaagaagttgaagacagcacgttccaaaagcgcaccagcaccgatgtagtaaacaaaacgtgcacctgaaacctttgaagcacggtcccagtctaagatgccaaggtcagtaccaatatcccagtgagcctttggcttaaagttaaattcagtagttgggtgccacttacgaacttcttcgttgtagctatcgtccggaccaattgggtctgaatcagctgggaagttaggcaatctaagcaagatgtagttttgcttttcagttaattccgcaacttccttatctaagtctttgatttccttacctacttcacgcatagcagcaattgcatcgctagcatcttctttgttacgctttttttctgcaatttgcttagaaacgtcgttacgcttagcctttaattgttcactcttagtcaaatccttacgacgcttagtgtcgatttcaactaattcatccaattcttctggcttaatgccacgcgtagccaatttcttctttgaccagtcaagattctcacgaatcaccttaatatcaagcatataaaacctccatgatatgcataaaaaaagagccgacttatccctacacttgggacgaatcggctcttacacggtttcgcggtaccacccagcttcagtctatctagactgcacctctttaccagacgagtaacgacgtcaaaccgtgcaactattaattgcccacattattgaaatctggaagcgactatgcattcactcgcaccaaccgtgaactctctgaagcagtcttaggatttcgtgtttgcatttattttaagccattcttcttttttgagcaaataatatttttctttaaacgaaaaaagtgcactaacttgtgtgtaatcgacagtataaacatactgaaatcctagtgttttaagcaatttctgtgatttttcattatcggcaaaagttccagcccagacttctacttgctttttctttttaaaagcataggtcaaaatcaatcgtaaagcttcagtcatatagccgtgaccttcaaacgactgatctagcaaaaagccaacttctttagtctttaataggccactcttttcatctaagccgcgttcatacaattcaaccagaccgatcacttcattgttcttgcgcaagcaaacgacataactttcaggacgcgacatatattgcttcacgccattaaccgcctcagtcagattgcggtattcctcaaagccagccatcttgtggtagcggggattgccaccccacttcagtaattgctgcgcgtccctttcttcaaaaggtctcaaatatattctcttagattcaagcattagttacccatcagcttcaagagccactttgcaccaaactgtaggcctatactataggccgcaattgtccatggcttacacaaaataataatccaaaaataagtccaaaacttcattttagtcaatcctgctagcaggcaaagcacgtcatcgggagctgctggggcgagaatacataatgcaaagaaccaattaaatttattctgattctctgtccacttcatatatttatcaagcgtttcttccgaaacaatatgcaaaataaagggccggccgtagtgtctagctaaaaagaagttgataattgagccaatacaaatccccacgtagttataaataaacccagcaactgggccaaagaagaccacgcctcctaataaagacacgcccccaggaataatcggaataactacctgaacaatttgaatcaacacgaaaataatcggaccaacaatttgtttattagccagataagcccgcattttagcttgatcggtaaagatccccaagcggtaccaataaatcaccagcaacacgattgcgactccacaaactatagttgcaatattgattaatttacgactagccttagtcgatagatgcattttctcgccttccttcatcgcctagtagttcaattttaacaaaaatccagcccagataccgtaaacatgcaaatctaaaaaaagttttattattttagctactttgggcagatactatataataaagttaataagttattagaaaggtaggcatcttatggttgtaattaagaatgatattgtttatgacaagactaaagaattaaaaacggatatttactatcctaatgatacatcttctaataccaagattttaatcttctggcatggcggtggctggtttagaggtgataaagacagcgtcaaaaatctaggtattcgctttgctaatgcgggctttatgaccttcatccccgactactccttagcacctaaataccactttcctgctgctcatgaagatgcattgcactttgtcgactggctgttgaattctgaatacactgatcaagacgatatcaaaaacattgttcaaattggagccagcgttggcggtgaaatggcaattgaggttgctgggaaatacggtttccctactgtcacctggtctgctccagttgaatattcaaactggattaaagatcatcaagatactaaagcatccccagatgccgctaacgattttggcattaccgatcctgaaaagatcagacaatctttctacaagcacttcacattaacctacacaggtactgaagatgaggctgtattacaaaaattagacgctaagtcatttgactatagccatctcaagcaattaatgatgattaattccacagatgagttgacaccactagctacagtattggattttgttaagttcttagctgacaaaaacttaggcgtacagctcctcgtaattcctggtcacggtcacgccatggcctatggtcccgattatgtagacgaatcgctcgattttttatatcaaactattaagagacaaaattaagtatgattaacatccaaaaattcgttcaagtcagaaaaaaactaaagttatcacaaactgagctttgccaaggcatttgtacccagtcgaccttaagtaagtttgaaaataatgggcaagtgccttcatttaaaattctcaagcagctttgtgaacggatggatattgatgttagcgatattatggacagcagtgagcacaaatatatcgcgcatatcctgtttgaagcggattttgcttttatcaattttgattacagtaaaatttttactttactttcacaaatcaaccccgaagtagacctaaaacgccaaacaaatcggattcattatcactatttgcgcggacaatatgctctaagaagtgatcgcaatcaaatgcaatgtcattaagttaagacattgacaattaagggtgcttttttagagatcgaatcatttggattcgatctctttttttgtataaaataaaggcgaaaagacctgccttttcgcttatcttatatattttaaaccttcaaaattattgccagaaagctggtgttaattatgaaagcccttcataagaatattctaaaacgtcttgatcaaattatcaataatactggggatcatattcacgattttattaataatcctcatgcttttaccaggaaacgcactttagatgcagcgacagtccttaaaactacaattaacatgcaaggtcagaatttaaacagtgaactctttagagcttttggcgaagatgcaactaaaaagaacgataaagtagttagtacttctgcctatgttcaacgcaaaagccagctttctcctgcttgttttaaacatattctgactgtttttaatcaagatctatttaatattcaactttttgatcatcactaccgtttgtttgccattgatggctctgactttaatcaaatctggaatccgaaatcgaataacattgtacaagcttcttctcataaaaagaaaccctattgtcaaattcacgttaatgccttatatgatctattgaataatacctaccaggattgtatttttcagcctaaatcagaaatggatgaacgcaaagcggctgttcaaatgcttaaagctttgaattgtggtccatatattgtaacaatggatcgtggctacactagtttcaatatgattgaaaactgcaatcgcctgcctaactgtcattacataatacgaactaaggctggacaaggcggagttaaagaaataacgacattgcctgatcaagaatgtgatcgtgagatttcctgcctggtaactacttctaactattactacatcacgcataaagccagtgagaatattcaccatgtccagcatcattatcgccaatatattaagtatcgctctaaaaatacccaggatctaagctgggattttggcgagttatgcacaataaaatttcgagcctgcaaatttagaattaatgatgccaaatcaggcaaagaagaatgggaagttgtgctaaccaatcttgatcgaaaaaattatccgctaaaaagaattaaagagctttatcatctgcgttggggtattgagacctccttcaagaaattgaagtattctttaggcagtgtacagttccattccaaacaagataaatttattgaaatggaaatttatgcccatatgattatgtttaatgcaatcagtcaaattgatgcacaggcctatattccgcaaaagcattgcaagtatcaatatgccatcaatttcaagcaatcatgcttgattattcagagcatgtatttggcttcttctttaacgcaagattttgaacggatccttattcagatcagctattataccattccaattagaccaggccgcaaggacaagagaaatattaagcccaaatcagctgtatattatttatatcgcgtagcttaaaaaagcagaatctgtgctatgcattatttgttgtacgaaaaaagcaccaatttaaccaattaaatgttaaatcagtgctttaaaagtctaatattaattgtcaatgtcttaacttaatgacattgcaatcaaatgagtgcgctcttttatttcaacaatatcttgaccacccaggaattgcctgaaaatgatatttaccgcttgttggcattaaatggttgtagtcaaatctatgctaaacaaggtgaaacagagaaagccgagcactattatagtcaagtattaaagaacattatggacgtcaagatcgataatattttgactacaatgcatgccttaagtattttatgtgatgccggtgaattctatggcgaacgaaaaatgtatcgtgagtctaatgcattattgcgctatgcctataagattggcgctgagaagcacgtgattttttacatggcacgcatcctattgcggcaaggcatgaatgatattgatcagtcaaaaaagaaagcaattgctatccaacatttgcacgatgcctgtgcttttgcccgaatcaaccgcaacacgattacgctaaatcaggctaaaaaattactaaaaaaattaaatgactaagatccaatttgaaatatagtaataagagtttgttcatttgattttgcaaaaatgataaaattagtataaatgaacgctgtttaggagtttcagataggttgactttggaacgaattatcaagtttatgtttgacagtattggtagctatttatccattcgaaaaattgccaatacgttaacttcaatgggacataaaatcacaccaaatacggtagaacggtatattaatgcgttactcgacagtttgattatctatgacgtttcacgattcgatattcatggaaaagagcagctaggttcgctaaaaaaaatattacattacgcgtggtgctagttaaatcgttctagacaataagccaaattataagctaaaattgcaatttccaaccggctttgaaagcctatcagactacgtgctcgattgttctcggcattgtaataggtcagaagcgaaaagtcgctttcaattgttctgcgaatagccatcaattgatgatcattgtgctttttagctcctgtcatatttttacgatatggtgtccaaagttcgtaacccatttgttttagctgttgatgcagttctttgcctaaatagccttcgtcgccaagaagatagtaattagatggatgggtattttctatcagttcaactgtctccctggcatcatgaactgatgcctttgttacgacataatcaagaatgtaaccgtcatcgctaacaatggcatgaactttgaaaccatagaagtaaattttcttggtggccttataaccaatgttggcataaccgcgaaaaattttagcacgatagtttcgaattggttggcaaacaggtaccggaaagctgtcaatgatcaagaactgtccattcaggtcaacctttttattcatttcttgccgtatctgataaatcaattgcaatagctgacgtgaacgccgattaaaacgtgagtgtgataaacaattgaaacattcacagaatcttctttgtgattcaattcctgtcttagcttgccagataagtaaagccaaaatcagactgtccgtagttttaatttgatcaatatttcgccgatgagtaaactcagccggtgcatacaaacgataccagtgccgacaaattatcactaaatctttaaaactaacttgtaaatggtggctaaaacgcttaagcttaaggcagttcaatcagatcagactcttttctattattactatttacaagtcgagtctaacaagattggacttttttattaactaaaacgatttaactagcaccacgcgtattacattgttgatactgggcttagatatcatttgttggcaaatcaaaaaaagatcgtggacatataattgaaaatattgtttatcttgagttgcttcgtcgtggatataacgttactgtaggtagcatccctaatggtgaaattgattttgtcgcaagaaagaataacgaaattttttattatcaagtgtccgaaacagtgctagatgaaaagaccttagagcgcgaattgaaaccgtttaacaagattaatgatcattatccaaaatttctattaacaatgaatgaatttggcaaaaatgataattttaacggaataaagcaacttaatattttagattggttattagaataattaagctaagattaagaataataatttaaaaaaagaattcgaaaaatccccatttgtagtgaaaatgcctacaaaatggggatttttttagataatcttgtaaccagtaactggcttagcaggtactgtattgaaatcaaagctagcaagtttgtccagttcagtattaccatcaataattgtagtaacaccttgagcaatcatcaggttcattactttatccttgtctagatccttagtgaaggttaccaagactacaggcttatgcaaagcacgcatgaaaccaatttcaaaagcactaccatcatctacattgtccatgtcatacaagaagacgccacatgtagagttaactagaccttccaggtcattgttataagtggcaaggcgccaagtcatgctgcgaatgccaccaatttcaggattcttttcatccggatcaacaaaattttgatcaaatggaaaatgcactctgaccactgtcggattttcttctaacaaggcacgagccttatcaactcgagcacgttgatcatcattgtaaaatggagtgcctaaataaaccttagcagttgaaacttgtttgttcatgcttttgtcccttcaatgtttaaaacttacaaaataaaattatttttcattttagcatgacttttttacaactaaaagcacaaatagctgtgttttcattgtaaacgctttataatagaaacataacttattaaagctaaacataaaacttattggaggaattattttgtctagatatcaatcaattaatccatatactaacgaagaatttgcaagctatgacaattctactgccgcacaaattgacgatgccattaacttagcacacgctttatataaaaaatggcgtcatgaaaatcctgagacccgcagtcgtcaattacacaagatagcagatgctttgcgcgagcatgaagatgacttagccaaaatgatgaccctggaaatgggaaagcttttgcgcgaatcaagagaagaagttgaattatgtgcttcaatttgtgattactatgccaaaaacggggtcaaaatgttggctcctactccaatcgaatcagacttaggcaatgcctattatttgaagcaatcaactggcgttattatggcttgtgaaccatggaatttcccactttatcaagttattcgggtcttcgctcctaactttatcgtgggcaacccaatcttactgaaacacgcccacaatgttccaggttctgctgctttaaccgctaaaatcatcagacgtgctggtgctcctgaaggcagcttaattaacctttatccaacctatgatcaattaagcgatattattgccgatcctagagttcaaggcgttgcattaactggttcagaacgtggcggttcagctgttgccgaagctgctggtaaaaatttaaagaaatcaaccatggagcttggcggcaatgacgcatttatcgttttagatgatgcagatccgcaagtattgcgtaacgttttaggcgatgctagaacttataacgatggccaggtatgtacttcatccaagagaattattgttgaaaaatctcattatgaggaagtgctacatacgcttaaaaacgtcttttctaatcttcaagcgggtgacccacttgaagccggtactaccttgccaccaatgaattccgaacgtgccaaggaaaaattagaagctcaggttaaaaaggccgttgacgcaggagccgagattttttaccaatatccagagattgattctaaaggtgccttcttcagacctgtaattttgactaacatcgacaaagaaaatcctatttatgatgaagaattatttggccctgtagcagaagtctttgtagttgacgatgatgacgatgccattcagcttgcaaatgattctagctatggcttaggttcatctgttatctctaacgatatcaaacgtgctcaaaacgtggccgctcaaattgaaactggtatgactgtcatcaatggccgctggattacctctggtgaattgccatttggtggcgtgaagaagtctggctacggtcgtgaattaagtgacttaggcatgatggcctttgttaacgaacacttagtaattgatgttactaagaataatcaatagtaatttttcgataaaagaaacatactaacctagtgttggatcatgaatcgacggattcacgatctggcactttttattttgtctaaaatagaaagtgaagataaagcaaatcaagtcttcagctttttagacacttgatgtcgtaaaagaaacggactgctttaccacctattcttaagtctcttcgaagtctgtgggcacttagatgccgtgtttagaaaattagaattaataggttgataaagaggtttatcttcacagcggaggttatattatggaatcacaaattattttcggtattgatgttagcagtaaatcttccacagtttgtgtggttaatgaccggatcaaacaaggcgaatcttttagaatctctaatgattcctttggctatcaaaaactttatgagcaactgaaccaatatttgataactcctttagttgttttcgaagctactggtgtttattctctaagcctgcaagctttcttagaggattatcatattaagtatttgaagcttaatccgcttaaagcgaaaaagctaatggacaataatttacgccataataaaactgataaggtagatgcttatcgcctggctttaattcaatttaatgccccgcaaaagttgcgtgatccacagcccagagagtatcatgaacttcagaatgccagtcgctattatgaagaacttactaggagtatagttactactaaaaatcaattgcaccgcaacctccaatccactttcccacaaattgaagaaatactgtctcatccatctggcagaatttattgggcgcttgttagtcttttcccacatgctggatatgttctagaaaagaatgagacacaggtaactcaaatgcttaattctatttctggaataggacaacaaagggcacggtacttaaccacaagattatacgcttttgctagagaagcttatccttatgattccaaagatagtattatcgttagagctattcaaaggaacatttctaatttgttttcactccagcaagaacgcgactatgtaattaactacatggaaaagctggctaaagcagtaaacgctcgtgctttatccatctatttgagtatcccaggggttgctagaattacagcagtgagattagtagcagagctcggtgatctaagacggtttagcacttcagctcaaattgatgcgtttgttggcattgatccaggaaggtaccaatctggtgaaaaagacagttctcttggcattaccaagcatggcaatcatattgccagaaaaatactttatcgagttattattcaaatggagacggtaaaggctacgcagccttgccatataactgattattatgacaagaaaaaacgatcttcaaatagccaaggctataagaaaatcgccattgcatcagtccataaactgatacgcacaatgtttgctcttatcaaacatgatcaattatatgattacaacatagccaccaaaaataaaagactttagctgaaatcaaataatcaacttaagtataagcaacctatggaaaaactacaagtattcataggcttatttgtggtactttcgctttttcttaaatttaaactcttatttgctttaaccttattcgcatcattaaaacaagtaaatttattttcttaaatcattgataatacttgactttgggtagaaaatacgctggcaacttaaccagcgtatttcttttacttattattaattctatttctttttaaaaagattatatccagccaaaatcgtggtcaacacgctagccaaaatcataaagtaagctgaagctccgagagaaactgcatatgacataagttgactcgtcaattgagccagcaccccagttgaagcatgtgccgcgcttgatatttgaaaaatcatataaatcaaaaagattgattcaatcaaagaaaggaagaaggccaaagtctgactagccttagtatttttcaaaatattataaataatgaaaattgggaacaagaatagtagcaaccagacaatgtaaagaataagtgcataccatgatgtcacgccagatgaaagcaagcgccctgctaaaccgaacagtacattggaaatagacattctctgcgtgtaagccgaggcacccgagtcggtaaagagaacgattagactaactaaagccgtaaaaataactgaaatctgcacataattaaagtgatgtttgcgaacattttttatttcacgtacatgattttcaatccgaggatatttttgcacaaattctcggtttttcgctttgactttactttcacgtgcatccacccggttaaagacatcggaaccaattcggtcaatcttttgcgttaatcgcttatcaaccgtatactgctcgatcttatctttacgatcacacacaatataaagccaaaccattagggctaaaaagccagtccaccctgccgctctagaaaaactcattaggattaaaagtaagactcccaataagaagactaaggtcgcatttttcctaacccacgcaatcattctttggacagtggtgttttgcttttcaggaataaattcttcccgataggctgcacggctgataatcttttcgccttcatctggttcttcaaactttgctttttggtgctgatctgtgaaaaagtcgtctcgatatttttttagattgaagccacagtttggacaaatatcatctgtttcactaattttatggccacaatttggacaagtagtcatataaaaattcccttctttttcaatctgttagtcattattataacatgtatcagaatttgaagatcaaaacaaaaaaagaccgaatcattgcgattcggtcgaaaaaattatttactaactatttttcaacattaattggtaaaacattatcaatataaggtgaatgtccatcagcaatcaaatctgatatctttctcaacattggaaattgtatgttcctagtatcatttccaaacttttgatatgcttctggagttgcatctttatgtaataattcatatcctaatcttttgtagaaattaacactttcgtccacagattcaagataaatcagctgaacacctgtatacaatgcaatcaccatgcacatggaaaagaattccatcattagtgctctaccaattcctgttccttggtattccttgtcaattgcaaaataagcaaggtttatatatggtgtatcaactttataagtaccatcatccttcttaacattctgtgttaataaccctactgttgacgagaaaaaaccaactatctgatttttgataggatccattaatacaaaagtctttaatttctgtgtactttcgaacttcggacattccttacgaaaaaaattatctataccacgattagtggaatcaaaatgtagggctaactcttcaaaatgtggacacgtacttaacgggcataatttaaatgctctactttgattcatgcttttccttcccacgttgaattactatcccatcagcttcaacttctttttgcaacttttttatagacacacgtggtactggattggctattttgtttttgaattctttaaatgctttttcatttttaaatgttatctcagcatttctaacaatacctaccataattaccaactccttttagtgtacctattaatattatacaatcataatctgttttactattagtttcaagatttattttaacaaaaaaagaccgaatcattgagactgtaaaatagtttgtgtaaggatgaatgattccttaaatttatttctttaaacattagaaaaaggagttcctttctcgtatgattggtttgaacaaaaaaacacatacagaaagaagaactccttcatgaatgattttaccaaagattttgctcaagctctattcaatccagacaaaataaatgatttattgcgcaaagagctacaacaggctgttaataacttgttagaagctgaattgaccgcctttctgggctatgatccctatgccagaaatggctggaatactggcaactctagaaatggtgcttatttccgcaaagttgatacgcaatttggcccaattgaagtgcaagtgccccgggatcgcaacggtcaatttcatcagcacacgctgcctgactacaagcagcactcggatatcttggaaagcatgattatcaagctttactccaagggcgtgaccaccagggaaatagccgatctaattgaaaagatgtatggcagccattacagtccagctcaggtatcaaatatttccaagcagatgattccaaaggttgaggcttaccacaaacgcaagctaagcgacaagtttttctgcgtctatttggatgcgacataccttcctttgcgccgagaaacatttgagcgtgaagcagtctatattgccattggcatcaagcctaatgggcacaaggaggtcattgactactgcattgcacctagcgagaacattgaagtctggacagatatgcttcaaaacatgaaatcccgaggcttaaagcaagttgagctttttctttctgatggtgttgttggcatgaaaacagccttggccaggacttatcctaaagctcattttcaacgctgtttggttcatgtcatgcgcaatatctgcgctaaagtacgcgtcgacgatcgtgaaaagatcatgaacgaattcaaacaggtgcatcaacagacaaacaaagaagaagccacagctgtcctgcatgacttctataccaaatggggcaaggtttacagccatgttatcagaagcttgaaagacatagaaccagatctgctggtcttttataactatcccaagcagatcagagcttcaatttattcgactaacatgattgaatcatttaacaatgtgatcaagcgcaaagctaagcctaaggcagagtttccaactgaacagtcgcttgatgcttttattggcattcaggcaatgagctacaatgaccgttatttcaatcgaattcataaaggctttggtcaggttcaggacaccttagaatcctactttgattaaataaataattaaaaaatcaatttacgagaaagaactatttacacaaaagatttgacagtttcgaatcattgcgattcggtcgaaaaactatttattaattatttttcttatttcttcttttggcgaacttattaaggtcaattccctcatatgtcaacttagtagctgctgacatagtaattggcaaaatgaagaccaagatgagcaaaccaatatccacggctaaggcaacttcaatcaaagttggaatacctgatggaatcaaggctgcaaaagtaccacccaagataattgcggctgatataacaaccgtaccaatgatagcacatgccttcaagattcttgaacttggagtagtgtatccttcagactcaagttcacgataacgagtcatcaggaagatactgtagtcaacacccaaagcgatcaacataatgaagctgaagaatggtgtgttccaagtaagcattgacttaccaagaactgctttaacaatccattgattgattgaaagtgagcagagataagcaataagtaaagtaccaagaatgtagactggttgcaataatgaacgagttacgaacatcaaggcaatgccgataccgattaacatgatggcagcagttctaaggaagtcgccactggcaactgtcttagtatcttcaatcttggaactttgaccacccatagctaccttagcattcttcaaagcagtaccttggaatgacttcttagccatagcacttaattcttgtgacttcttagtagcttcggttgcacttgggtttgaatcaaagacaacaataatttgagctgacttcttgtctgggctgaggtaaacatccattgacttcttgaacatatcgttcttcaagaattccttagggatgtagaaagtatcagcggcagctgatgaacctaaacctctgaggtaggtttcaccttgacctaaaccactattaacagtgtcaatacctgaagtcaattgtggaactttgcttgccaacttaccagcgccagcactgagttgtccagcacctgtgttaagttgactgatacctgaaataagttgtggagcttgaccagctaattggccgataccactgttaagctgaccggcaccatttgcaagtgtgccaagacctgtgttcaattgacccgcgccattgttaagtcggtttacacccgcaccaagacgactagcgcctgacgaaagtgaacctaagccactgcttaattgaccagcacctgaattaagtctttgtgcgcctgccacaccttgtgaagcagctgattgaacttgcgtcaagcctgagcttaattggttcaaagcagtagctgcacctggaagtgccttgttagaagcttgagctaatttagctacttgagtctggagagttgataattgttgaagtgatgaagttaaagcacctaattgtgagctaagtccagaaacatctatagcagcattacccgtttgagtatcagcttgtgtattactaaatgccttattaatagctgcttcagccttttgctggtcttcagtagttaagccagcactgccaatggcttgaagtgctgctcgttttgcttgtgcctgagcaccagcagctttttgactagctgctgacaattgtgctgcttgttcttgtaacttcttcaaacttgcagttaatcgtccaacttgtgaagtatctaatccactaacagcttgattcaattgttgaataccactgttaatttgtggcaaagcagtttgaagttgagcgagttgttgtttgtttgaaccactcaattgagttgaaagttgtgaactcaattgttgtaattggttaaccatttgttgggtaccactttgcaagctgctagcaccattctttaagcgatttgcaccgctaactaattggcttgcaccactttgaagtgcgtgagtaccacttgccaaacgaccagcacctgtttgtaaacgtactgcaccactttgtaattggcttgcaccattttgcaaacgactagtaccaccaactaattgttgggcaccactttgaagacgacccgtaccatcttgaagttgatctgcaccatccttcaaactattggcaccattagcaaccttgttggcacccttactcaatttgcccaaacctgaacgagcttgatcaacaccgtcgttaaccgtgtttaattgattgttgacataaagcatatcaattggttcgccgtaaggttctgtaacagatgtcgcaaatgaaacatcttttgaagcttgaagttgcttagtcacttgatcaattaacttcaaattttcttcattgtctaatctatgcttgctttgaatgtacaagtatgatggttcagccatccctttagagaagtgcttttgtactatcaacaaaccttgcttagatggaactgaatctgcaatttcatcagtgtcatcgtagttcaagtgacctgagtacattaacatgaatggcacaacaacaactgctaacacaaccaagtaaataattggatgcttcaatatggcagatgaaataccatgccataacttgtcatcactttcaccagtaaatttcttaactggccagaacattttcttaccaagcgtagccataaagaatgggttgagtgttaaaagcactaccaataaaacagcaacgccgaccgcaacaccaacagctgattggtaaacggagaatttagctaaacttaaagcagtaaaaccaattaagatggatgaacctgagtaaagaattgttttaccagcattgcgcaaagcgtcatgcatggccttatacttgtccatcccttttcctagattttctttaaacttgtcatacagcaaaatgttgtagtcggtaccgataccgaagagcacgataaccataaacacttgcgtaaagtttgaaaatgggaaattggcgcttttaactaaattagtaacaattgagaaggaagtaaggaatgaaacaccaactgtcaacaatgaaataagtggaacaattggtgacttaaatacgataaccaaaacaataaagataaagacaactgtaatggcttcagtcttcttaattccctcttgaattgaagcggagaaggcgtgctgcaagacatccgcacccgttacataagtacgaagcccttgcgttttcgcggccttgttcatttcgttataaactttttcaatcgtaccatgactcttagccacattaaattgtgctacccaagtcgtgccatcttttgattgaagtttctttcttgtagcaatattggaatctggaagtaatgaatccttgattccgtacttgcttttatcattagtgaacttatcaagcgtattattaatagcctgtttatcggcatcagttagcttgccactctttttgttaaaaacaagtgctactgcataagtgtttttctttttcgagccccaattgttctctattgactgtgccacattgctttgcacattacttggcaacgtaatgttagagtgatcattagtcagctgcgtaatgttaggcaaagcaacaacggaaataatcaatattaaaatccacgcaatcagttcgaaaacatggttcttcagaaatttctgcactttcctatttcctccctatttgttgtaaatcaggtactggttctacaagccgtaaaatcatttcatgataattacgattagattcatcttctgtttcatctccaaaagacttcgatttatccaaaaaaacgtaccctaatacggcgccaattaaagcatgaaatgaaatgacactttcttttttaaaattaagtctttcacccattttaattaaatccaagatttcttgattgatggccgcatcctttggatattcgttcaaatgatacagaatacttgataaagccggatcgcttaataaaaagtcgcgcacaacatccgcaaacttaagcaatgcatccctacctgacataccgattagatcgttcatcaactcatgacgtaagatcttaatctgtcttgcaccaactagtgatagcaattgtttgcgtcctgaaacgtaatgataaagcgactgtgagcggacatcgagcgccttagccaatgctggcaaagttgtagctgtcagtccttttttagaaattaattcagtagcttgatcaattattttatccagatcaagatttcttttctgtgccattttcatccctcctttgtcttagcatagtaaataatatacacctacagtgtgaagattacaatctacatagtgtaaataatttattttttctataaaaaaataatgaagccttctcggacttcatcatttccgttacttatgcttttttataaaccaagcattaaccgttttgcccaatttattaaaattcttgtgttgcgtgctccaaacagacatacagtaagcacgtccgttagtctgaacaattgcgacagcaaaatcatcatcaccaattgcataaatgccgccacttaagccagaaactaaacttggtcgctctttagctagggttgctaaaactcggctagcatattgccgatttaatacccgaccttgatacaagccaatcattgttttagctaaatcattagctgttgtctggccagtcatatttgagttgaccttagtttgagtggcacccatttttttagcaacttggtcaatattattaactccaatttttctagttaaggcactagctgcagttttgttacctttaagcattgcgctacgcaaataacttacaccataggtaataccaacttgaaacatcttatcacccttggctttgtcttttttgctaatcttaatcgcagttcgcgaccccatcttgcctttttgttcttgctcatacaaggcgatcagtaaaaataaccgcattgtttttcctgcgtcatgagccttattagtattaaaaactacggcaaagtgactagagttagttaaatcctgtgctactacctggaagctatcatcaatgcccataacttttttgatttgcttgactagcttctgattactgcctttttgagctttaacatggttagaatattcaatcgaattaaccttgggctccttaggcttttctaattttttaacctttggctccttggtcttctttttattcttagcgaccttgctgttatttggttcaacaatctttaactgcgcgttttccacccgctttatgtttgatgtatacaaaatgaatgcaaataaagtcacaattaaagaaccaattaatattttatgtttcattaaaacgcctcaattttagaagaaatgatgccttttcatcaaaatgactaaccaaaccattaaaacaaccatcaaaataatgattaaaacccagtcaaatgaattttttaaaattggtagactaacattcatcccataaaaaccggttaaaatagttggaatagttaataccaatgaccacacagttaagaattgcatggtatcattcaaattattgttcatcatattattactggtagctgataaagtcttagttacctgctgggaaatctgcaccatttctgcagactggcttgattcaatcaagacgtcatccaagcgttcactggcttctttagtgaagtctaatttgctgtgattcaggccatgcaacatgattaaatccgtctgaattgaacttgataaataaactaaacttttttcaatattcgaaagttccaccaaatctttattgttaatgtcatcagacaacttctgatctaggctgttacgttcaacgtcaagttgcgttacagcacgctggaagtattgtgatgaatataggaaaaagagcatcaacaactcagtaacatctttagcttcagacaaacgctcccgcatatgttcatcgttgaattcatcaaacacatagctggttgattctgtatggaaagtaaagatattttcacccactactaaaaaagtgattgggtgtgaggtaaagtgcttaatcgtgttggtcggccaaattggcacatcgtaaacaagcaagtggctcttagtatggacgtcatagtcatagtgaggacgttcgtgacggtcagaaatataagagataatgtcaggcgtaaaattaaaatcctgctgcaatctctcactgtcttcttcacttaaattattgatgtcataccacttatactttgttcttaccggaaaattttgttgtctaatcaaccagctcacctcaacttttattttattacctagtaaatggtaccatttttctcaattctttttccacaaaaaaacagaccttacggtctgctctttgaaatctaattgctatttaattttattgcttccaagcagcatcaaatttttgcttaccagtattaatttggatgttagtattttgacccttttgggctgcagcaaagatattttgcaaaatgctgttcaattggttgtatgcagcatttgaattcttagcaacaggaacactgtacaagttcttcatagcatcttgaagtttagcaggaagcttaatgctcttgttattcttgtattcactagattcgattgcactattgtttacaggaatgtaaccagtagcattagcccacttaatttggcttgacttagatactaagaacttaatgtacttaaatgcagcagctttttgttcagcgctagcgtggttaaacatgtaaatatcagtaccttgttgcatggtgtatttgccaggacgtggagcaacatcataagtaaacttgttacctacaccttgcttaacaaagccttcacctgcagaagtaccaacaaacattgcaaccttttcgttagcaaatggacctgaaaggtagtgttctgaaccagctactctgaagtaacccttcttaataccatctgcatagaagttgagaactttctttgaagttgaaccactgaagttaatcttatcagtaaagttcacgccttcgtccttcataccaagagtgtagtagttggatagtgaatcaaaaccagcacctacaactttgtggttactcttcttgtagatagtttctgaaacatccttaagttcttccatagtagttggaactttcttgatgccatatttcttaaacatggtcttgttgtaagtcaaagtttcaattgacttgttaaatgggataccgtattgagttcccttaatttttgcaccatcaagaagttcagttctaatgtcagatgcctttgcactgccccaaccaacattcttgttgttgatatatggggtcatgtttacaagcatcttgttttgagctgcgttccaaagccaacctggataagcttgagtaatagtaggtaagttatttggtgattgcaaagttgagttgatcttagcttgcaaatcattgtatgcaccttggttttcaagcttaacagtaattttagggttcttcttttcaaattcattagttaattgctttaaagtagaaccttgtactcccggcatagcgttccagaagacaactgtagtcttcttagtaatctttgatggaatcttctctgaacttgatgaagaagaattgccgctctttgaacaagcagcagtgccaactagggccaaagtagcaacggcagccatagtaagtttcttactaaacttcatttggataaatcctcccaaaaaataaaactaaacaacaatatgtttttgatttactaaagcgtgattgtttgaccacgtttaggtaaaatccgttctccatatgggttctcttccagctctggatgcaatgtgtgcaccggtactaaaacagctggttgaaccccagcaatgatttccttgagttctttttcatcggcatggcctgaacagcgcaacgccttatactcaatatcattgttagctaaagcctctacaaatggtttgtaggcaggatcaaaatcccctaatggctcagcatttgagtggatatacaaaccacccttttgcagcttatcataatcggtgacaacttgccacatgtatttatgattatctgctaaaagctcatcatagctaacttctagctctggcttaaggtcagcatagtgctcctcattaggcatgtaatagtaaggatagtcttcatccaaactttcattaatcaaatgggcacgctgagcatgtaaaacgacctttcttggtgaatcggcaatgattcgcaataatcgttcaacattagtaggataagtattaaaagtgatttggcgttcaggattagccttttgcaggcgcacgatttcttcagttagttctacttcattcttagggccagtaaactcttcactgttttcatcatgcttttcttctggccaagaaacaccagtaccttcaatgattagcatatcgctatttttagctgcctgcataaagtcccgcacccaatctggatgatagccatgcaagcgaatgtcgccagtataggcgatttgcttatccggtgtcttaactaatagaccagtagcaccgtaagcgtcatgatcactaggatatatttccaggataatatcgcccaccttaattggtttcttgtattctgccgcgatgattggacgagtataagtccgatcatgacctgcagcaggaagcaagaagtcgcccttttcattcaaggctggcaataaatgagctgtaattggacctgcataaagtggaatttctggggccaaaaagttcattgccttactgtgatccaaatgtagatgcgaaatataggccgccgcatgctcccagcggtcagtatcaattggcttacccgttaatttaggatcgtaaaaattaggcacatccccgattaatttatttttaatcagagtttgataactttcatctggcaattttaactctggccgataaacttcccccaagtcaaacaatacatgcgatttgttataggccacttcaatcatcggtccaccaattgtggttaaaccattataaaaagttactgtcgttttatcctttaaggtcattgcgcactactcctcgaataatttgctttctaaagatgaagtacaaaatcaagattggcaaaacagtcaatgtggcagcagcaagttgaagttgagtttcactacctgcatcagatgcaaatgaagttaaaccattgttcaacaatctcatgctgtcttcgttagttaccaataatggccagaggaatgaattccaaccagaaatgaaacttaataaagcaacggtgaacaagccacctttagacattggcaccaaaattttccaaatatattcccaatcactcgctccgtcaatcatcgcagctttataaattgtctgtgagattgaaccgaagtagctttgcaagtagtacatgtagaaaattgaagttaaaaatggcaataccaaaccaatataagtgttcaacaagcccattctggcaatggtattgtagttagtaaagataattgcttcaccaggcaccatcaataatgataaaagtaccatttgaacaacacctttacccttgaacttcaagttaaccatggcaaaagcaccaagcaaggcgttaaacaaactcacaattgtcgttacactagctgtgataaaagtgtttaggaagtaacgagtaaatggagcttgggcgaatactttggcataatttgaccattcaaaatgcttaggaatgattgttggtggaatagtggttgtttctctaaaactcattaatccacccaaaatcatgtagataaatggaaagacagtaatgattgcgaaaatcgctaaaataatataagcaatcaaagtgccccaacgaatcttcttcatcctttactgtcctccaatcttcttcatcatcttgcgttgcaagaatgtgacaaacataatgatgataaataagacaaccgttgcggccatcgctacacctggagtaccaacaatttggaacttgttatagatgtagaacactgcagttgtggctgagttaccaacacctgcttgtccattgaataaggcataaacagatgtataaatcttaaatgcagcaatgatattcattgttaataagaaggcgatcgttggcacaagctgcggcattgtaatacgccagaacttttcagtaccagttgcgccatacatatccgcaattgtgtagtaattagggtcaatgtttctcaaagcccccatcaagataacgatgttaaaagctaaagaagtccaaacaccaaagatgataattgtcgtcaatgacatcgctggatcatcaatccagttcggtgttggtaagtgaaccgccttgagcaagaagttaagcaaaccatagtcaccgttaaaaatataacggaatacgataccaatagcgatagttgacgtaacatatggcataaagaaagtcgtttcaaagaatgacttatgctttatcctgctgaaaataaaccaggccaacatgattgaaatagccaaagcaactggcacagaaattagggcatacaaaatagtattcttgattgcccgccaaaattctggatcactaaagatatattgataattgctgaagccactccaatttagattaattaacgagccgctttgaaaactcattacaaaggcccgcaaaattggataaatactaaagaaagtaacaaagataattgttggcgctaaaaagagccacgcctttttctgattgctcttcattagtagacacgctctccttccttagtaaacaggaatactcgatcaagacgcatcttcaaattgatattatcaccaggcttaattggtgtctcaaggttgactaatgaacgagcttgtaccccatcatgggtaaacttcaaaattcgttcacgaccgattaattcgacatcatcaaccttagctgaaactgcaccatcttcttcgactggcaaaatattttctggacgaacggataaaacgtactcgccgtcagttaagtcacgtttaaaacgatccttgtctaaatcgtccacgttaatttcaaaatctgagccagtaatcttgccgccattaacctttacattaaagttatcaatcacaggattaccaacaaaattagcaacaaagtagttatttggttcaagatagaagttttgtcctaagtcatcttgttggatcacgccattattaaagagaataatcttatcaccgattgacaaggcttcttcttgatcgtgagtaacaaacaaggtggtaatacccacacttttaactaaagcacgaatttcttcacgaatcttcaaccgtaaacgtgcatccaagttactcaatggttcatccatcagcagaatcttaggttgttgcactaaagcacgagcaatagctacacgctgctgttgaccaccagataaattgcccggcttttgatcagcaagttcggtaatctgggtcgttgccatatatttttcagcaatcttcctcgcctcatccttaggcatcttttgcttgcccacagtcagaggaaacattacattctgaagtacagtcatatgtggatataaggcatagttctggaaaacatagccgatctgacgatccttaggtgctacgttaacaactgacttgccatcaaaaaggatgtcaccgctagttggattaagcaaaccagctagcatatttaagatggttgttttaccacaaccagatgggccaagcaaacatacaaggtcacctttttttacggaaaagctaacatccttgattgcttcatgaccgttatcataaacctttttaaggttctttacttccacgaatttctcatcattcataagtttcacgcaccactatatattgatttaaatttttaaatttttctattaattctaagctaaatatacgaaaataacaaataattttcatttgaaattcggggtttcaacgactttgtgaaatgcttctcagcaagtattcggcttttgttcgcatttgcttttatttttcacttatttctttttaaaaattcgggtttactaaatattgtggtaggtaccaaaaaagccatgaattagtcatggctttttgtatcataagttatctccacgttcaaattgatattttgaactattcaaggcttgacgaaccaacttgctcatcaagttcttagtctttttggtaatcacaccagcagtttcatcattagcgctagttaaatatttaataagctctctgccttccatatttttagctttttcatcaataagatcaattcggccaataccgtagctttgacaatcatcacgataggcgtttacctcataaatatattggtgatagcgtggttcaacaagcacttgtaaagttttatacaaccagtaagcactactatctgaattaaccatatgatctgccaccttatagttaagtggtgtatcctcaatattggtgtagaaaggaacatatggtgaatatgcataaaagcccatattaatccattgaattgcagccatcttggcaggaacatcatttctaatttgcaagatgcttgattcttggtttctgtctaaagcaatagaacggaacatcttttgttctttttctgaaccagatgaaaaagtgtccattggatcgtatggtgtaccgttatagtgactagttaaaaatctttgcacatcttcaacaccaatcttcttttcgggaacgcgcgtaaatggcatttcttgactagttgggtcttgttcaatgcttggattaaacaacttctgtccataccaagttcttggagtattgtaaaaagcatcagcttcatccttagtaccaaaaatatctctgaaagaaaagctaccgtcagtactattgtttaaatgattcttttctacgaattctcgaataccagctgaatacataaagttatctggatcatcaaagtcaacattttgaatcaccatgatgttaggacaaattgcgtaagaatcatcaggaacacgagccgcaacccattggtgacccgcgccagtttccagataccaaacttccttgttgtctgaaaaggcaataccgttgctttcaccggtaccatatttttcgattaattgccctaagcgcttaacaccttcacgagcagtcttcacgaatggcaaagtaatataaaccattgagtcttcgttgattccatttgctactaaaggatcatgtcctaagcagcgagcattagtagcttcagtttcagtggctgacatagcaacgttatattcgttaatgccttgctcgtcccagcgaccttctgaatcatcagcagtagggacagcagtccatttgcagccatcgccctcaaggtgcatcttaaagccgttatattttgatacataatcttcatcataatgacgggctgggtttaccacaaaaactttttcgttaatgccaccataaccgtcttcgtcacgcgcaatcatggttgatccatcgattgaagcgtccttaccaactagcattgcagtacagttatcttttttcattattgtttgtacttccttttttatttcagtaataatttttcatattattaattctactactcattaacctgcatttgccgatcaacttttgctcgaccgttattatagttaaaaacataaccgggctgcacgttatagagatagacattgaagtttaaactgccatcagttgaaacggcctgcaaattcacgccgcgggccattaactcattaccacgaaaaacagcagttgcttgataaattacacgcttattctgccgcagtgctctcctaaccttagcctcaaaaatagtctgaatcttttggttagaataagcagattgcgtaaacaaattcttaggattattttggtcccctgattgattgcgtggatcataattgccgctttgatcaattccagctgagactgaataggcaatcaagtggccccgattatagatttgggtaccgttacggtgattatagtgccagccagtcggttcaacatattgccttactcgcaagctatcattagccacattgcgcttttccaaaaaggctgtattagagcgcgatgttcgattcaatgaatcaaggttagagtaaatcacccgatttatcttccatgcgcctttgaccaaagtcgacttatcatggttgacttcggtataagcgcgactgccactcttaaaattcaaattagctaatttttgataatcagttggcgatagacctccataattggtcttggcttttgatgcatcgctaattgtattagttacatgttcatcattattgccagtaaagtcacgcaaaaactggctaccatttggatcgctgccagctttagtaaaaactccccataaaatcgcgattaagacaattaatgatgaaacaaccgttccttgtttttttcgtcttcttcgtgtcatctttttcctctaactacgagcccaatcatcaagcatgcttaagaaaaaggtctccgaaaaacgcttaatcttagcaccatttttgatcaaatcacgtgctgcattcaaatcctgattatcttttctaaagaaatcttgatcacccatgattaagtaattagtcgttgctaacactgaattgtcaacttggccgcccatattgttgatcatcttgcccgcttcagcttcgttcatatgaatattgccagacaaaacgatattcttattttgaaccggattgtgccaacctaagtcaacataatccaattcgccaatagttaggtcgatattcttaatcttgctttgtgccttttccaataaatcatcagtaaagtgctgggcaaagtcatcataaaccttgatcgtatcaagagaatcctgcaaaccgtggtgagcctcaacttgagcaattccagcccgctgcatgcagtcaagcagacggttatggcgctcgcgtggataatatgtccgcgccaaacgcaatacgtcaacgtaatcattatcaagcactggtaagccatatttttgacttaaatcatacaaaaagttcaagtcaaaattgacgttatacccaatgataacgtcatcaccaataaactcacgaaattcacgaatagcctgctcagccggaataccttccttcccaatttgctcttcagtaattccatttagcttagtaataaaagcaggaacagaattattcttggaaaacttcaccaaattagtatattgatcaacaatttgaccgttacgtaccttaaccccacctaattcagtaattcgatcgcggtaaggatataagcccgttgtttcaatatcaagcattgtataattggtcaaaaagtcaggcttttcctgtccttttttacgcaacttgtcttgcgcaccggtcacatgtaaaattccattttttatgtaaatactcattcttcacctatttaattatttaatcaaattcatcagcatctcgtgcgaattgctatcaaaacccattgctcgtttcttaagatcagctggcaaatctgcatcagctaaatcagcggcaatataatgccaattaggaaattgctgcactagctttaccattggatcaagtaattgaggactggtctcatctacgcctaattccaaaattacgacattcttgtcctcggctcccgttagaaaccaacgaaaacgcgtattagcatcggtatcagggaagaagttagcattcagcggcatatgcaattccattggactattgcagtcctcgcactttggtactaaatctgccgttacgttgccgttcttaattgccgtcataaagcgttctactacttcatggttatccttttgaccatgattaatcccgctagaacactgcattttagtccaatcaccaaaggcattgaaaattcgattttcattaaagcctgcattttcaaaaaagtgcccgaatgtactggtcgcaataaaatattttttatcacgaattagcttttttagagcaagcatcgtctcactaggctcatattgtaaggaatattcgttgattagctcactccaaaaagcccattgctcgctccaagtatcaaatctcttatctaatgcatccccaattgtatgcacatcatacttatctgcaattttgccaaattgatcatcaaagccttcttcacttaggatatctagtccctcttctttggccatgccattaccagccgttacgatcaccgtgttagcatttttcagccatttttttgctgtcactaaatctgccattttatctctttccctttgaataacctgtcaagcgtaattgtccattaatgtattctcctaagaaaacatcactgatactattataacctgcctcttcaacttgttgctgtaaccaagcttcgcttttgtgaatcaactctaagacatcaatattagcctgaccatcactaattattgggaaacgaatgttagcttcatcattttcaataatagttaattgcccgttttgctcaaagatacaattcttaatcttttcaacagagtagatacctcgactgcgcaatttaaacattaattcattagcggagattcctgctttcatacagttgccaactaacaccttgccatttttaattacttgaacaggtttaccatcgataatccctctaatccaattattgtgatcacggctgaatttcaaaataaaaacaaccaacgtccaaacaattagaactaggaaaaactgaagaattgtaatactaggattgtaaatcaagccaccaataattccacctaaaacataattctgcaactgatctaatgcagtcgtaggagccagattagacttaccaaagacattgatttgaatgattaaagttaagataccgagagcaaacttaatgaataattgtgtgtaatctagctgcattattttattacctctactttatgatcaattacatgggcttgcgttaatgtgtaagtattgcgatcatcattaaggtttaactgataatcaatatttttagaatcaatccttacgatcatgccattagttaaaaccgttgaactaactaaaacatcagaagtcgaaacattttcatctttagcaatcgatttgatgaatggcacgatttgaatcgcctgtgatttttgcgtattaagttgcacatatttttcatattgcgtaccggcaaacaaaagcaaaaataataaggcaataatacccaaatcgcgatacttggttgcaaaacggttatgtaaatatagcaaagcaaaaattatcattgctaacgccgagactgtcaagaagtttgtgtaaataatctctctcgttgattgacttttttatttatcttttaatcaaaataggattctagggtgtctcgaacttgcccaaatcctttatgaatcctgttaaagtaacggtcattgtaatccattgcctgaactccaataaaggtgtcaagcgactgctcagttggaaattctgttttaggcttggttttccgcttaagcctgttgttaaaggattcaatcatgttagttgagtaaattgaagctctaatagctggcggatagttgtaaaaggttaacagatcaggctcaacctgtctaagatctctaactacgtttttgtaggctttttcccagttttgatagaattcatgcagcacctgtacagccatttctttgtttgactgagtatgaatctgcttgaattcatccagtgctttttttcgatcgtcaacccgcattttggcactgatattacgcatgacgtgtaccaagcagcgttgaaaatgcgctttaggataggactggcagatagcctctttcatgccaactactccgtcagacaagaagagctctacctgttcaaggccgcgactcttgaagcctttgagcatttcgctccaaatctcaatattttcagtaggcgcaatacagtagtcaatcacttctttatgaccattaggtttgataccgatggcgatataaactgcttcgcgctcataagtgacccgcttaagaggaatataggtggcatcgagataaacgcagaagaacttatctgacagatgtcgctgatgatatgcctcaactttgggaatcatttctttagaaatattggaaaccatagctggagaataatagccgccatacattttctcaatcaaatcagcgatttctcgggttgtgacgcccttggaatagagcttgataacagtttgctctaaaacatcagtatgccttttataatctggcatagtgtgttgatgaaactcaacgtttctgtctctaggaactttgatttctatttgtccgaattgcgtatcaaccttgcggtaataagcaccatttctagagttgccagtattccagccatttctggcatagggatcatagcccagaaaggcagtcaattcagcttctagcaagttattaacagcctgttgtagttctttgcgcaataaatcatttattttgtctggattgaatagagcttgagcaaaatctttggtaaaatcattcatgaaggagttcttctttctgtatgtgtttttttgttcaaaccaatcatacgagaaaggaactcctttttctaatgtttaaagaaataaatttaaggaatcattcatccttacacaaactattttacagtctcctaacgccgccaccaacatcaaagcatataatactgcctgattagtattctggttattttgaatatatttcattgtataaaaggtcatgctctacctcacccttcatatttttctttcattctaacacagaaaaaaagtagcactttcgtactacttttactagaaattattcacttttcactattattaattatttttgaatttcttttaatccagctttgcgacggcccatgttaaaccatggtgaaacagtgaaggctaacacatcattaattacatagatcaatgaattaattgccatggctaagtttgcatcaccttgagcataagttacgcccaaaagaatcaactggaagacgccactagcagtccaccaaaagtattgattgttgtaacgcataaagcacatgatcccagcagttaatgaaatagcaaaactaatagcatcaatccaaggacgaggatcattggtaaatttaccaatcaaaaagccggatacaacataaacaagtaaagtaccaacaatagcaacaagccattcctttgaaccgaattttcttaagtgattcttagtgtcatcattccatgatctaacagcaataataactggtaaatctaaagttgcaatataagcaatctgttcaaaaatggaaagataattcttagctgaccaacctgcatagataaaacaagcagctgaaatcaaccccaaccaaccattaattgctttagtagcgttaattgccaatacacaaagtgtacccaaaagcgtaccaataaaagtaatcaaagttacgcttgtaattttgccttgaatcagcaaagctaattgaaatccaaacgcaaaaaaccataaacagtaattttgaactggccagcctttcaattgattaaatagccaaacaaaataattttcgtgttttctttccattgtactgagacgtaaaaagtagacaattaaaatattggattaatagaggcttgacttcgatactctttcggggttaagccttttaatctgctctttatcctttcgttgttatagtattcgatatattcctcgattgcttgagttaattcttgaagattatgatacttgtattcttgatcatagaacatttcagttttgagcaggccaaagaagttctccattagcccatcatccatggagttgccctttctggacatgctttgagtaataccatggagttttaaagctcgctgataacgagggctttgatactgacagccctgatcagtatgaaaaatgcagttattaagagctgtttctttggcaaaagccttgtcaagcattgtcattactaaatccatatctggatgtttggagatagtataagaaactatatcgccaccgcagccgtctagaataggcgataagtaaagcttttcattattaagatgaaattcagtgatatcagtataccattttgtgttaggcagggctgcgaagaaatcacgatgaattaaatttggagctattttgccaatagtacctttatagcttgaatatttgcgcttattgcgcctgatgcctttaagacctaatttatgcatccaatagcgaacggttttctccgtaactttccagccctctctgattaactgcaaagctactctgcgatatccatagcggccttgatgatgattaaaaatctcatggattctagcaataagctttgaccgtttaggcttggcgggctgtcgtttgataatcttgtagtatgagcttctggcaattataggtagctcagggtgctctgcaatcgcagctaatacataatttaaactaactttgaattcttgccttagatccgtaatcaccctagctatttcttctgatcttcttggtccaaggcacttagtttttttacgtattcgttcacaatacgcaatcgcaagttttcttctttcagctgctggatctctttctccagttccttgcgagatttctgcttttctttggtcacgggcagggcgtcctttctgtttgataatgacattatacccgtttttcttatattctctaatccaattgttaagcatgccaatacttttaaaccccagttccaaagacagctgtaagtatggtttattgccaaagattgcttgttcaatagttcgctgcttaaactctttggaatagctttggtttttagtagttaaaatttctattccatgcatatcaattaatctaagcatatagtctaaattagctagattcattctgtacgctttagccaattgactgattgagatattttcatctttccatttatgataaatttctattttttgttctttattaaatttagacatagtaaacattctaagctaaatagtgaattagttatccgacgggataattgattcactatttttattcttttgtagaattaaagtagtggtaaaacgatatgccctgaggtctttagacacttgatgtcgcataataaactggcagttttacttaagttttcaatagtctcttcgaagaatgtggacactagatgtcgagtttagaaaattagatctgatttcttaagtaaatacgttttactactaagttttggaggtttttattatgcaagttacttttggaattgatgtaagcaagtctacttctactgtttgtgaactaattggtgaaagccaaaatgaactaaccattactaataatcgtcctggttttattcaattgcttcatgaattaaccgctttttctaaacatccgcaaattatttttgaagctaccggtgtttattcacgcagactgcaggcttttcttgaagactacggctatgaatatgttgttattaatccgcttaaagccaaaaaagagatgaatatggggctacgctacaacaagaccgataaaactgatgcttatcatttagctttaattcaaagactttatcgccatccggttaatcaaagcgaatcccaaacttataagcagcttaatgctttgagccgcttctatgaccagttaacagctgacttagtaatggctaaaaatcgactttaccaagctctacaatcgacttttcctgaaattgaaaatctattttcttctgctaaaggtaaaaattactggcaaatagttgtgcgatatcctcattgtgacttagtaagaagagaagataaaaaacagcttattaactggttaatgagcttaaaggggattgcttttaaacacgctctaaggactgcagataaattaattgaattagcttatcaagcttatccagttgtatcttgctctagcatagaagtcgagcaagtgcagtattatgcacacagattgcttaatttaagtgatcaaagagaaaatttaatcgcaagaatggttaagttagcgaagtctttgcctaatcatgatttagaaaacctagaaagcattccaggctttgcacagaccactgctgtcagagttttagcagagttaggagatttacgcagatttagtaatcctaataaaatcaatgcttttatcggaattgatccaggcagatatcagtcaggagaaatggactctaatttaagtattactaaacatggcaatgcagtcgcacgtaagttgctttatcgagctattggacaaattgataatgcagctaagacaaatccgtgtcatatagcagattattatgaaagcaaaaagctatcctctcaaaccaaagggttcaaaaagatagctattgcttcaattcataaactaatcagaaccatttatgccctgattatcaatgatcaaccatatgattacaacgtagccacacataatcaaaaagactttagtcgtaattaattgatcaagtacattataacgctaagcccaaaaatcagatatggatctgggcttatttgtcgtgtctaactaaaaaaataaatcgacactaaaagatgtttaagttgaaatttaaacaaaaaatgaagccaaacttcttattatgcttgactttacgtagaaaaagacctaaaagtgtctaacttttaggtctcagttcacatcctattcaacattccccttttttattttaggttgcaaaatacaagatcttgtgccttatccgtgctatgtaaaaaaacatcgatatctagtatagtggaccattaattaaatacaagaattgacatttttaatttttgcgttaataacatatttctatttccgtttatcaagcaaacatttattaattttttctaaacagcaaaaaaattttgttccttttagtgacacagtgtcatatgatatatacgtgattattaatttatatttttatggaggtacactcatgtttaaaactaagaaaacgcaatttgctatccgaaaattagcacaaggcgcctcagcagttttactttgcttcggcatattgggcggagcaagtgcacctatcgttccagctgcaactacagatgacccaacaaaaacagtcactgaaagtacaattaatagtgagaatacttctttcaatattgaaaccaccaccaatgcatctgataaattcgcttccatcagcaaaaatgggggggtacaacggtagtgccaaattctgctgagccagtttctccggatcagtccattacagaaaatgataatcagcaagaaaaaactactgtagagaattctactgagatatctgagcctgtcaaagacatcaataagtttgataatgatgccaatgttgataaagacgaaacaatcactgtaaaaaagccaacaattaatgtcgacactgaaaaggtagaacaaggcgatgaaacagagaaaagtaaactcgaagaaattaaaaagtatattgaggacgtagccgcaaaacatccattaggcattgccggaattttccacctttttggtaacgaaatagatggatctgctcatattgcaggaaatgtcgcaacagacaaattaagtgctggcaacttcggtactatccaagatgccactagtaacttgactacttgtgatattcattacatcggcagtattgatcatttgaatcagattgatggcgaaaataaactagttatttttggtccagatgttgaatataaatcatacgaaaatggtagttccattcaggtaaaaataaatggaaattggcaaaaagtaggaattccatacaacaaaactatcagagctgaccaaattctagatattcaaggcgaactagataaattaagcgataaatcagacgaatgggctaagcaaacgcaaaccgaaggcgtaattgctgatttcaaggagggtaaatagttggatcgacgtttctaatgctatcaaggatggcagcaaagatcctatttatgtaactattgatgcaaaatacctttcaggcaataacaagcatgaaattgctattaaaggcatccctgcagacgcagaaacaccaatcatcatcctaaatgtaactaatgttcaaaatggcgatttaaccgttagcacaagacttgttttggattattcagaccaaactagcatcaatggcgtaagtgaaaaaccatctcaacttaataagttattatggaattttggaacagatgttaaaaatttaactattgaaggagacttccatttaggtagtattttagctactaacgcacatattaccgctaacaaaaatgttgacggtaatatcattggtaacaaaatcactattaaaggtgaaactcaccgttgggacctaactccgccattagtagaagttgaaactccgccggaggatccaaaagatccacctaaggatcctgaacctactcctgagcctgaaccggaactaaagcctgagcctactcctgatcctgaagaagagagtactcccccattaccagaagaagtaattcctccaactgataatgaaaattcctctgacttcaaggaagaggacactgctcctctaccagaatctgttgtagaaaaacaagttaaaaagaatcatccatccccttcaactactgaagaaaatattgcacctcatgctgcgactatcccaacctcaactataactgaaaaagaaacagttttacctcaaaccggtgaaagccaagacaagctaatgacgattggactcatcactactagcgttgcttcattgtttgcagtattaggcacagtaatcaaaaaaagaaattaattaaaaatgattcaattcaagccatttttattcttaaaataatctagaattaagtgaggattaaaccatgttaaaaaatagactaaaaatattccaacaaattcttcctactaaggcaactaacactccaaaataccaattgcctatcaactattacgatcctgaaggcagcatggttggcacttattctggaattaacttggcggcaaatgaaactatcactcaccaccagctcaaaagatttatcaacatccatcttcccgaaaactacgaagtttttccttactttgcttatcctaaggagaatatcacctgtgaaaatctgcctgatgaaataatgatcacaatcagattatctaattaaaaaaggcgactcgattgagtcgcttttttcattgcaattgatattaatgttgcgaagcaccagttgtagtatctggttcttcgtgcttttcttctttaacttctgcagccttagttgaagcaccagttgcggcgtctggatcagaatttctacggtaagttgcaccagtagttgcatcatcatctactaccaatttttgaccagtagtctcacagaagtacttaactaatggatataagtctttgacccattcataaataccagcatagttaccttggtcgtcttctacacgcttataatagtccacaaccaacttcttcaaattgcctgttggtattggcatataaacatcatcatgacctgcttccttagtccgcaaagcatgaacaacttttttaacattcggaataacgtcacgaacatctgggtgaactgcgcgcatcgtatcacccacttgatctggcgtagctagcattttcttgttaggatcagttggacggttataccacaagaattggttattatcatcaacaaatgtcattttaccaatggtatttctcagcatccaattaagttggttaacagttaacagacctgcatcaagtttgacataatcgtcaccctccgcagcatgaacttttttagctgctttatctagccaatcaggatcatttttatcgattccctcaactgtatacttagacttaccctttgcatcgaaatcttcttttaagtattcatcggcattcatatctttaagccattttggttcagccatagtaagaccccctcgtatgaactttgttaatctaattatataatgtaagtggtttcaattcaacaattttaatatatttatataatatttttactagctggattatatattattttacgcgtggtgctagttaaatctttctagacaataagccaaattataagctaaaattgcaatttccaaccggctttgaaagcctatcagactacgtgctcgattgttctcggcattgtaataggtcagaagcgaaaagtcgctttcaattgttctgcgaatagccatcaattgatgatcattgtgctttttagctcctgtcatatttttacgatatggtgtccaaagttcataacccatttgttttagctgttgatgcagttctttgcctaaatagccttcgtcgccaagaagatagtaattagatggatgggtattttccagcagttcaactgtctccctggcatcatgaactgatgcttttgttacgacataatcaagaatgtaaccgtcatcgctaacaatgacatgaactttgaaaccatagaagtaaattttcttggtggccttataaccaatgttggcataaccgcgaaaaattttagcacgatagttgcgaattggttggcaaacaggtaccggaaagctgtcaatgatcaagaaatgtccattcaggtcaacctttttattcatttcttgccgtatctgataaatcaattgcaatagctgacgtgaacgccgattaaaacgtgagtgtgataaacaattgaaacattcacagaatcttctttgtgattcaattcctgtcttagcttgccagataagtaaagccaaaatcagactgtccgtagttttaatttgatcaatatttcgccgatgagtaaactcagccggtgcatacaaacgataccagtgccgacaaattatcactaaatctttaaaactaacttgtaaatggtggctaaaacgcttaagcttaaggcagttcaatcagatcagactcttttctattattactatttacaagtcgagtctaacaagattggacttttttattaactaaaacgatttaactagcaccctgcgtattattttatataaaaaaagctgatcaacgagcaactctttacatctttgtctcaattgtatgagtgtccaaatgaatgatcacgtcaaacatcgctttttcttctggtgaaatcttatgagccacctcaataacagcaatacgtggattcttcaacagcgtcttatgaatgcctaacgacaagttcgggtcaagcgcacttgtcgcttcatcagccagcaaaatcggccgatctgataaaagcgcgcgagcaatttctactctttgaatttgtccacccgacaagccactgccgttttcacctacagccttgtctagaccctgttcctttaccaattcatctagaccagcctcatgaataacttctttcaaatgctcgtcactcactttacgtcctaacgtaatgttgaaacgcaacgtatcatcaaacatgaatggcttttggttaacataggaaaaataattatgggcagcatcccaatttcccgttacatccgtaccattgatcaaaattttaccgtctttgggctttctcaaacctaatagcaagcgaagcaaggtggtcttgccccaaccacttggcgccatcaatagaactttttcacccggcttaactgttaagttcacattctcaaagatgcgtttgtgatcactacctgtaacataagataattgttcaacctccataccatcaaaatgatcgatcttctgcttatcatctttcagcacgtgatgcaaagcgcgctgggtcttttcccacattggcacagtcgacttgacttggttaaattcgttaaaaagagtcacgattggcgtgataaagttcaaggccaaatcgaccatcattactaatgtacccacctttaaatttccctgcagcatcataataccgccaatagtacatggtacgatgaagcaaaacaattcagcagctgaataaattaattctagtgcccaagcttgagtcaacgtcatattacgcagagcgttctccattgcctgggccgcaccagctgctcgtgtaacgatgttggtgcgcacgttataaagcttggtagcctgtgccccatttaatgaatcggacacattttgcgtatagttagcgttagtcgttgcccaaatcttggacttacgtgtaatgataggactagtaatcatttgaactaatgctggcgcaagcgtagcaatcaaaaatactagggtcatctgccatgaactataaaaagcaaaagtaattgccccgaaaaacgacaaaccttggaaaatcatatccaattgtgccgttatccgattagtttcaatctgttttaaatcgttggtcatcagtgataaaccgctcttgatatcaggctcaccttgatcaaccaaataacgcaagttagtgcgcttaaaggtcatattcacgtcacgaataatgcccatctttaccgtttcatagacaaagttactggccataaaacacatctgacctaaggcagtcaaagcagccaggcgaatcaaatgcagataatcatgcgatcctgacgaagcaacattcaacataatttgtaccatataagctacaaagacgatgttgcaggccttgattgcggccaaaatggtatagctaataatttggctttttttagcgtacttcaggctcattaatttctccttttctatcccgttagaaacattatacccgctagcttgtctttttctcaattagatacgataattagagtaatcattttaatttttaatgaaaagcagaaaggaacttttaatgaagactggtactaaaattattactttagacaacggttatcacttatggaccaacacccaaggtgaaggcgacattcatcttctagctttgcatggtggtcctggcggcaatcacgaatattgggaagacactgcagaacaattgaaaaagcaaggcttgaacgtgcaagttactatgtacgatcaactcggttcactttattcagatcagcctgactactctgatcctgaaattgccaagaaatatttaacctacgaatatttcttagatgaggttgacgaagtccgtgaaaagttaggacttgataacatttatttaatcggccaaagctggggtggcctattagttcaagaatacgccgttaaatatggtcaacacttgaaaggtgcaattatctcctcaatggttgatgaaatcgatgagtacgttgcttcagttaacagaagacgccaagaggttttaccacaaaccgaaatcgacttcatgcacgaatgcgaaaagaacaacgactatgataatcaacgctatcaagatgacgtacaaattttaaacattaatttcgttgaccgaaagcaaccatctaagctttaccacttaaaagacattggtggaaccgctgtttacaatgctttccaaggcgacaatgaattcgtaattactggtaaattaaaagactggcatttcagagatcaattacacaagatcaaggtgccaaccctattaacctttggtgaaaacgaaactatgccaatttcaactgctaagattatgcaaaagaagatccctaactcacgcttagtaactacacctgacggtggtcaccaccacatggttgacaaccctgacgtatattataagcacttagctgactttattcgtgaagtagaaaatggtacatttaagggcgaaaattaattaacagatattcaggctggaatcgatttccggccttttatttttaaggaaaatgatatggatgaaaaagatgtcaaaattctgctagttgaggatgaagaaagcgtcgctagcttcgtcaaaactgaattagaatttgaggattaccaagttgtttgggctgaagacggcaaaaaagcattagacctttttactcaagaaaagccaactttaattttgcttgattggatgttgccagtatatgatggcatgaccgtgttacggcgaatccgcaagcaaagtgatgtccctattattatgcttaccgccaaaaattctgcctctgatataagctctgctcttgatcagggactagacgactacctcaccaaaccatttgaaatcgaggaattgctggcacgaattcgggtagtcttgcgaagactggaaaaaatgcggcagcaaaatgacgtccctgatacttccctagaatttggcccattaaaaattgatctgcttaagcacgaattttactgtgacaccgagcaaatttatcttactcctaaggaatttgccttaatcactgaactaatgcgggaccccgaaaaagtcaaaagtcgtgacgagttgcttgatacagtctggggatatgactttgttggtcaaaccaatactgttgatgtttatattcgaactattcgcaacaagataggcaatccctacaaaaagatcattaaaaccatgcgcggcttgggctattgtttgagaaaattagatgataatcatgaaaaaagctgatcctcaaacaactacgcaacaattaacccgtttattcgttaggctatttgtcgctattttaattctggtcaatttggcttttctaattatttcatcggcctatatttattaccaagctgaacggcaaagtgaacaagttgttgaagcagtaaaagaaaatcttgattcaaaatatgactggtcggctatgctggatgcttatttggcaaaacaagacgatgatgccatcattttaaccacccctcaaggcaaaagttattactctgaaaatgctcacgagacctttaaacaaattaatcgccaaaatcattatcaaaacatggtctattccaataagcatatttacttcttacggacggaaaactcgcatgactttaaaatcaaggttgcattaaacattgatcgcttatttcatttaattatttggctatttgggacaatgattgtcatcaacttaatcgctattctgctgagcatcccccttattcgccgttttgcccacaaatggagtcgtccaattcaggtaatgaataatgaaattcaagaaatccagcaaggtgcttcaactgagcaaatcacagtgccgcaacaaccattagagattcgaaaattagcccagtcttttaacaatctgctagcttttcaaaaacaggccttacagcgtgagcaacaattcgtcagtgatgcttcacatgaactcaaaacaccaatcgccgcaattcgaggacacgttaatttaatcagacgccatggtcaagccaaaccagaaatcatccctaagtcactggattatatcgatactgaatcaaaaaagatggaaatattagtcaacgatttactcaccttaggaagaatcgaacgcaatactgaagtcgtcaaaattgatttggtaagaattattaatgaagtagtgtcagaaatacagtcagtttatccacaaaaaatacagactgacatgccacaagtattgaaatatcgtattaattcactagattttcacaacattgtgcacaacttagtggaaaatgcggcaaaatattctcctcaagacagcactattgtagttaaattagctaaaaataaaggacaggtctctttcacagttgcagacaacggaatgggcattgcgccagaaaatcgcgagaagatctttcaacgttttttccgtgaagacacgtcccactccaataaagttaaaggatctggcctagggttagcaattgtcaaagctgaagctgataagtatcatggtcaaattaaagttacggataatagtcctcagggaacaatttttacagtttcttttcctacagaaaaatgaagaaatcttcatttaaactctattaaatcttagttttttaaagctgcttagctagtaagataaatatatcaagttaaagcaaaacaaaaaattatcaatagtttaaaggagaacatattatgaagactattaacttaaagaaaattactattactggcgtagcattactcggcttaggaactgctgcaattaccgcaactaatttagctactgaacctaacgtggttcaagctgcttcaagcaaaattaaggtttcacaaaattcagctgttaaaaagtttaaggcaaaattcaaggcagctaaagtcgaatcaatcagcttagataaagaaaaaggccgttacgtttacgagatcgaaggcttcaattcaacgagagaatacgaaatgaaaattaatgccgcaactggcaaagttatctcatcccactccgaaagacttgatcgagacgagcgtaataaaaaagcattaaatctcagcaaaactatttctcgctcaactgctactaaaattgctcaaaaaagagtatctggcaaggcagttgaatggtcattagatcgtgaaggttcaaagaatgtttgggaagttaccatcagcaagaacggccaaaagagcgaagtaaaaattaacgcaattactaaaaaagtaatcagtgttgaacgggactaattgagaaaagaaggtatagaatagatgaaatttactaaactgacaagtattgcattattaagcgcagctttattaacaggaactgtagcatgttcaaaacaagataattcaactgctaaaactactacccaaaagagtgttacttcatcaaaggttacacataattctgaatcagcaatgagcaaacaaactcaaaaagataatattcaaatcaaattaagccagcaagaagccattgataaattccatcaacaatttagtggcaaacagcttaaaagcattgaattaaatcgtgaaggcaaacattacctttatgaaattgaaggattcgattcaaacaatgaatattctgttaacatcaacgcagaaactggtcaaattggacatgttcattcagaaaagttagatcatgatgatcgaaaccaaaaagctctagatttcaagggcaccattagccgcgacgatgctagtcgtatcgcagaagagcacattaaaggcactagcgaagaatggaaactagagcaagacgaagacactggtaaaacatactgggaagttaaggttaaaaatggtcatcaagaaaccgaagttaaaattaacgctcacaccaaagaagttatttcaactgaacatgatgattaataagattaagaacataaagaagtgtctgggaaaaaactaagtctcagatcatgaaaaaagaacgttgaatttttgtttcaacgctctttttgtatacttttagctccagccttgatattattaaatcatcacaaaataaaaacaaaaaggtggaaactaacatgtacaagaattatatcacaggtcaaactgctttaacacttaatctagattttgccattccggccaatcatttggctaatgtcatcagctggtttgtagattcaattccagaagatgttttagtaggcaagactgctaaaacgggccgcccagcctatcatccagccatgatgctcaaaatactgctttttgcttactccagaagagttttttctggcagaaagattgagttgatgctggaagaaaatctgccaatgatgatcttggctgaccagcaaaagatttcatatcatactatcaataattttagatcaagcagccatgccaatgaactgattaaaaagagctttatctacttcactaacctgttagaagatgaaggcttaatcaatgaaggtgctgcttttatcgatggtactaagattgaagctgatgctaaccgctatacatttgtctggcgcaaagcggttgaaaagtatcatgaaaagctgaaaggccaggcagttgaactttatgatgaattgattactaaagaagtagtcaaagaaatggaaaaagaaaaagttcaaactagtcaggggctaaaggaattagctcaagaaactgaagcagaaattaacaagctgactaaagagattgagcaggaaaacaaagccattcctggcggttcacctcgaaaagccaagcgacgtggactaaaaaagattctgcaccggctaagaaaagattatgtgccaagaatgcaaaaatatgaagaagccgaagagatctttgccggacgcaacagttattccaaaacagatcatgacgccacctttatgcatatgaaggaagaccacatgaaaaatggtcaattaaagcctggctacaatattcaagcagtcacgaccgatcaatatgtagttgattatgccatctttcctaatccgacagatttcaaaactttggagccggttttggatcaaatgaccgtgttggacaagtttgacaaaatcgtcgccgatgctggctatggcagtgaatacaattattcgatgctggaggaaaaatatccagacaagaagtactttattccctacactatgtatgaaaaagaacagaccaaaaagtataagaatgatccaactaagctaatcaactggtactacaatgaaaaagatgattattacattgatcatcatggcgtcagattcaatttcaaatattacagccagcgcaaggatcgttctactggtcaggtccgtgattttaaggtttatgaggcagacgagttccagctaacgccagaattggaacaattggctaaaacagctagcggccgccagcgccaagttcgctataatcctaactggcaatatttaaaagaaaaagcaaaagaagttctccaaagcgaagaaggcagacacatctatggcatgagaaaatatgatgtagagccagttttcggacatttgaagaacgtatttggcatgcgcagaacgcacctgcgaggtaaagagaaggtcgaaaccgatatcggaattgcctttatgatgatgaatttgaacaaatattgtcaaagaaggtggctgaagggccgatttttattgttaaaaattttaaagagaacaaaaaaacgatcaagattcttaaaaaaggaaatcttgatcgtttttattcatctggaagctagttttttcccagacacttttattttgtctaatttttggataacttttttaccaataaccaatcagtttgaggatcgctaccaacttggaaagtatgctggctcactttttcaaatccatgacgcttataaaaatattgtgccggaatgttcttttcataaacgcctaaccacatgtaatctttgccttcttctcgtgctgtcttttctgcaaaatcaaacaaaacattgcccaacccgcgaagttgaaaattagtacgcagataaattcgttccacttctagagcattatcacgtaactgctcagtctgagcatccccaacattgatttttaaataaccagcaatttttcctttaaccattaaaaagtaaaaacgactattaggattttcaatctctctaatcaacttttccgtctgataatcttcctctaaaaagcgtttcatgtcatctggtgcagtataaggatcaaaagtcgttttaaaagtttcacgtgaaactttctgtaattctttcacatccgctgttgtaattgctttaatctcgtacttcatcaatatttcctctttccaccgttcttaaccaggtgccaattttcactggcattcttttctacaatttgtaacaaagcagctaattctgttctctgtttttgatctagtcctgtcaaaactatttcatttgaataagcattttctttttctattcgagcagctaatttatctcctaattctgtcacaaacaaatgcttaatctttttattctgctggtcattttctttcctaatcagctgattttgttccagttttttaatgctacgagctgccgtcgtccgatcaacattaagcatccctgctagatggtcagaaataattcccggattttctttaatgcgggctaaatacaggtactgacctcgattcaattgcatctctttaaattcaatattagcaatcgaatcaagtgctcgcgcaatagtgccaatttgacgcaaaatatcttctttcatgtttttcacctaaaaactattatatttaattttgttgtaattgcaacaataaaatataaaaactaaaaaagggatcgctccctttagttaattcatcaatttttctttagttcatttagatcgactacctgatcagctaactgcttaacttcatctcttaagtggtgagttaccataattacggttttatctttttgcgtcaaaatcaatctttctaattgtacgctagaagctttgtctaaggcagaagtagcttcatctaacagataaattggtgtatcacgcagcaatgcacgtgcaaaagcaacacgctgtttttgcccaccggacaactgtttaccttggtcagctaaaacagtatccatgccatcaggcaacttagcaattagatcctctaatccacattctttgatcacttcagaaatttttgcttttgaaacttggcgtcccaaagttaaattccaccctagagaagcagtaaaaatatatggatcttgctgcaaatatgtaatctgatcatgcaaatccttatctgaaatctggttatattccacatcagaaatttcaattttcccctgataatctctaagtaagccagaaatcaaattcagcagagtcccccatcagaatatatttatttttcagtttaaaatttaaattcaaattctcaaagataggcttatcttgtccagaatactgataagaaactttatccaattctagattgcttagtttaaaatcagcaggcaaagctccatcaacagttttaagcggtatagtcttaaatttttctataattggtttaactgatttgaattcttgccaattaaaactaatcccacttaattcagcgaaaattgtactggcaaaaaattgtgccccactgatggtcccgactggcgttaattgatgcaaaatcaaccagcctgtttgccctaaaatgataacttgactgataaaggctagaccattggtaatcgcctgagttatcccggctgttttactataatttagcgcatgttttttaacatcatcagaagcgccattgatctttttgacgattgtttgcggtaaattggcaagaaataaggtattgaagccattcaacacatcattaattgaattaaccaaacgttcattggcatgggtatattctaatgaccttttggccaaaattttagaaaacaaattgggaaccactcccataataattgtcaaaataatcacagtgaccacaagactgacattgaagtacgccaaagtgagcataccgaaaacaatttcactgatttgtctaatgatcatcatgaaatcctcgacaccaaagttattaatggttgtaatgtcattggtcagccaagaattgtaagtagctaccgtttgttgatgaaagcctgaataactcgtctgtgatagatcttgcgcaatgtcatttctaattaatttatccacattttgtgccaaacgggtttgctcaacattgactagacagttaacaatcgcgtaaaaaatataggcaccgcccattaaggcaacccacatgaaaaaacgctcagcttttaattttgcaactgcacttaaagcattagcgctagatattccggctagtgtcaaaaagcctgcattaatgactattaaaaatgtaacaaataaaaattcccactttaatcttttaaaatattgcagtaattccattgattctccttatgagactgtaaaatagtttgtgtaaggatgaatgattccttaaatttatttctttaaacattagaaaaaggagttcctttctcgtatgattggtttgaacaaaaaaacacatacagaaagaagaactccttcatgaatgattttaccaaagattttgctcaagctctattcaatccagacaaaataaatgatttattgcgcaaagagctacaacaggctgttaataacttgctagaagctgaattgactgcctttctaggctatgatccctatgccagaaatggctggaatactggcaactctagaaatggtgcttatttccgcaaagttgatacgcagtttggaccaattgaagtgcaagtgcctcgggatcgcaacggtcaatttcatcagcacacgctgcctggctacaagcagcactcggatatcttggaaagcatgattatcaagctttactccaagggcgtgaccaccagggaaatagccgatctaattgaaaagatgtatggcagccattacagtccagctcaggtatcaaatatttccaagcagatgattccaaaggttgaggcttaccacaaacgcaagctaagcgacaagtttttctgcgtctatttggatgcgacataccttcctttgcgccgagaaacatttgagcgtgaagcagtctatattgccattggcatcaagcctaatgggcacaaggaggtcattgactactgcattgcacctagcgagaacattgaagtctggacagatatgcttcaaaacatgaaatcccgaggcttaaagcaagttgagctttttctttctgatggtgttgttggcatgaaaacagccttggccaggacttatcctaaagctcattttcaacgctgtttggttcatgtcatgcgcaatatctgcgctaaagtacgcgtcgacgatcgtgaaaagatcatgaacgaattcaaacaggtgcatcaacagacaaacaaagaagaagccacagctgtcctgcatgacttctataccaaatggggcaaggtttacagccatgttatcagaagcttgaaagacatagaaccagatctgctggtcttttataactatcccaagcagatcagagcttcaatttattcgactaacatgattgaatcatttaacaatgtgatcaagcgcaaagctaagcctaaggcagagtttccaactgaacagtcgcttgatgcttttattggcattcaggcaatgagctacaatgaccgttatttcaatcgaattcataaaggctttggtcaggttcaggacaccttagaatcctactttgattaaataaataattaaaaaatcaatttacgagaaagatctatttacacaaaagatttgacagtttcctccttatattaaaaataatcaaattaataatactatatttatgtatttgttcaatattttttaatactttacttaaattactgcaaaattaaaagggatcgctcccttttaattagtctacataagcatatttatatgaccattgcgtaccagcagtattatgaatgatgccgtgaactcgcttgttttgcaagtaagctgtggtctgttgataaatcggtgtaatagcctgattactatttacaatcttagctgccgaaatcagatcattccagcgtatgtcaggattattggcgtcttgattgccagcttttttaaccaaattatcgtactcagaatttgaccacttaccgtaattgtaagacgtacctgtcattggaatttgcataaatgtcatcgggtcgttgaagtcgccaccccaatgagagagataaatgtcaaagttgccttgatgtgctcgactggtggttgacttatcaggaatattggtaatatttatcttgattcccttcaattctttggtccattgtgactgcaaatattgggtcaattgatcactgtctgcttcatcatttgaagataaaacatcaaaagtcaaactcttttggccaatctcctgtaatcccttttgccaatatttcttggctagagctggattataatcaactgtatttttcactgcttgttctttagcaaaatctatacctgttttaggatttgcagccaaatcattggcaacaaagccttttggcagagttgagccattgcctaaaacctttttagtcacaatatcacgatcaattgataatgataaagccaagcgaatatttttattattcaaggcctttctattaactgcatttttatccttaaaattataaagcaagaaacgcactaacgaatatggatattgagtaaagtcattattgctcttcaagtttttaacttgctcacttgaaagtggagttaaatccaatttgccctgttgatacaactgataaccagtattgttagacttaactacttgatagtgaatcttgttcaacttgactaccttcttgtcccagtaatcattattcttaacaaatgaccaggtatcattagttccattccatcctttaatcttgaaaggacctgagtagacttggtactgagccttggttgcgtatctattgccatactttttcacaactttttcgttttgcggcccaaatagtggataagccatcaatactctaaagtaagcgatcgggcgatttaacttaaccactaccgtctttttatccggtgcagaaattcctaatgcattaggtgatttctttcctgcaatgattgcgtcagcattcttcacgccactaaaaagataggcatacggagaagcggtcttaggattcaagcttcttttccaagaataaacaaagtcctgcgctacaatcggatcaccattggaccacttagaatcacgtatcttaaacgtccaggtcttaccatctttagatacggtcccagttttagctaagccggctgttggcttaccatttttaccaagacgataaaaactttcgaatacattgccagtttgaccaaatccggtagacttactgatatcaatagtatctagtggagctgtggtgcttaaatttaaagtgccactttgagctgccgacttactactgctattgccattaccacatgctgcaagaagcattcctaatgaaatagtaacgactcctgctaaaactccctttagtttcgacataaattttcctttctcaaacaaaaaaatgggatgtactccaacacggaatacatcccattaagaaccacaactttttaactagttaatcagtaatagtcttaagatgaatcaccacatcagagcatgtcaaataaatgctgtttgtacaacaacattcagtgtattgacattgcatttgacgcttaaacatgtgattcatcatccttcttacttttgataagaataatcataatttattcgatcacgattgtcaacaaaaatctattgtataattatagaaaaatatttggagaaatttttatggaaattataaaatatggtccttacactcttttcacacttattagaacaatcctaacatttatcgtggctattgagcatatcggtatctgtttcttagaaatgtttggtaaacctgaacaacaagctaaggcttttgacatggatatcaattttgttaaacaagaagctgctcaagtttcactagctaaccaaggcatctacaatggtatgttaggtgtaattttgatcattgctttctttattttccctatccctattctttttaacgtatggaaattaattctaagtttaattgtcgtagtagcaatttacggcggattcactgcaactaagaaaatctttttagtacaaatgctacccgcacttttagcattaatttttcttttcatttaaaaatattgcatttttgtagcaaaaaacataagaaaattcaaagctcctagtgataagctgtcaccttgtgattatgtaatatataatatcagtaaacatatagaacataataacgaggtggaattcatgagaaaattttttatcattatcagcagcattattactgggttacttattgggataattggggcaacgatctatctaaatagtcaatcgtcaaaggtaagtaactttaccattcgaactactaatttaacagctcaaccgaaaatgatcagctattctagcaataacctgccacagattaatctctcacaggattccgccgttcagaaattcaaatcattatatacacatgcagtaggtcaactaccttagactgaagtctagggtttagtggcttgttagcttgcgctaaccagaacaccaacttgcttagatacggatttgacttaccagcagtaatcttttgactattgccgatagaggtcgtctaattaccaaagccttttaagtccgcgagttgctagcggactgcagcttttctaggctgcttcttttattttaggattctgccacttgcctaatcctttttctaagatgttcacggccgcattccaatcacgaatatgatgcatctgacagattgggcaagtccattcccgatccttaagggttaatttcttataaccgttttggcccataatactgccacattgatggcatctttgggtggtgtacttaggatcaattgttagaaattctttgccatatagatatgccttataagccagcatgttcaggaaactacgccaaccaacatcagaaatagcttgagacaaggcatgattcttaagcaggtttttgctccttaattcctcggcaactactaaatcgtggtttttgattaatgcagttgagagaacttgtaagaagtcttcacgctgtctgcgaatcttgtcgtgcagtctggcaactgataagcgctgcttttgatagttttttgctagccgcaaattgcgtccttcttttttagcccggcgctgcctgcgagataatactcgttgagcacgagccagcttctttttggctttgcggtaaaagcgtggattagcgaccattgatccatttgaatccgttaagaaattatcaaggttgagatctattccaagttgactctgcgtcttaggcaaggctttaacaaaggcaatatcgctgcctaactgcattgataagtagaattgctcgtcagcggtcttttttatcgtcactgtcccaattctagttgagatatgattaagcaagcgctctttaatcagttttctaaaaccagcaatgcggacaacgcctagcttaggcaatttaatatgcttagcatcaataaacctagctgtcccgttatcaagaaaagcttctggctgcttaggatattgacagttggtctgatatgaccagtcgctgcgttttttatggaaagttgggattccatgaccaatcttacgatagttgttccaagccttctgataattttgaatggcattggcaagagcgaggctatcaatttctttaacacgcaaaaagctataagtatcgcggatattctttggcttagccaatagttcgctattagtgactacttcttctgccaacctagtctcataattattaagaatagaaaaggcaaaaggcattgcttgatattgtctaacagctaagtagcccttagcatgataattacttcgattacgtcctacataagagttgtagacaaagcgctgcgcatcatagtttagcttaatgattttcttttgcttagaactaggataaaagcgaagcttaacgccaaaatgataggctaaactgctcatttttttcatgtgtttcacctcctcgtattatataaattgtaattagtcatattgtgataattaatcaaattagtatttgctttttgatcttcacatgttagcctctaattgtcattggctttggtcaactggtctaggttatcacctcctgcagttttgtctgctttataagtctgccacccagacagttcctttatgctctaactcacatgctgtattgattgcttctttttgctagtccttgagcaattgggattaggtgcagctttcaaagaagcaaccagtgaatacttatactggcgagattgaacttaagaactgtaattaggggttaacatgtgaagatcaaaatctatgatcagaaatttgaaagaaaggaggccatttccaatgaaattatttgtcggtattgatgttagttctaaagatttacaggtcgttgcacttgattcagaagatcaaaacaaacgcttaattaacgatagctttgtcaatgatctttatggtgctagtgaactgaaaaaacaaattttagatctagctcaaaataaacactatgatcaaatcattattggcatggaagctacatctatttacagttttcatcctgcttactttttccaaaatgacgaagatttacaaaagctcaatgtagagactgatgtaattaaccccaaagaaaccagcaggtttcataaagtctttgaagaaagtaaaactgatcctctcgatgcttattacattgctttgtatctaagctttggacattatcgagtaagcattgccagacaagacaactatcttgctttagagcgtttaacgcgtaccagatatgaattagttcaagaactgactcgtaccaaacagcacttcattgaagctttatattatcgggttaataaactaatcactgtcgataaagataagattaatactcctcttttcggtgctacaatgatgtctattgtaaccgatagtaaaactctggatgagatcgcggatatgcctaccgaagacttaatttcttacttacaggttaaaggcagaggacgcttttccgatccagataccttggctaaagcaattaagaaagctgttagaggttcatatcgcttaggcaaagtaatgactgattcaattgatgcagtgctttctgttcattacaacatgattcaaagctttaatgaatctattaaagatctagaaaaagcaattgatcgtatcgttgatgcattaccagaaagcaaaattctggaatcaattcccggtattggcaaaacctatacagctggtattatcgctgagatcggaagtatcgatcgctttgataaagaagaacagctggctaagtatgccggcctaacctggaatcaatatcaatcgggagatcacagcaacgaacatactccaatggccaggactggaaacagatatctaagatattacttgattgaagctgccaatctagcaagattacatgatcctgttttcaaaaaatattaccaaaagaagtatgatgaagctgtctactcgccgcataaacgtgcttgcacattaactgcaagaaaattagtacgagttatctttaaattgctcaaagatgacaaactgtacaggacaccgaggtcttaatttcaaaaattggtctaaatttaaaagtaaacaaaagtttaacattaaaaaaatcaacctttaccaaggcttagtttcatatactcaaatttatgatcaaaaagaacaaatatcatcgcctttcatttgacttattaccacatgactcatagattagatatttatattttacagggaagtcgaacatatgtctctattttttaataaaaaagctgactgctaggtcagcttggtcctatccatccccacattaaaatacggggattttcgggcgtttttcattaaatcgatcacacttagtttaagtaaagatatctatgtttatgacatagtaggctatgatgaccgtaaagactgtactattcaagttgacgcaactaataacaagattctaggtcagtctacgcaggtgcttgattatgactacgaaaaagatgcgtctttgaacctaaaaaagacaatttcacgccaagaagctaatgaaattgccctaaaagaattcagtggaggaacaccgatttcatgggaattaactgatgacaataatcaatcaatttgggaagttaaaatgatccacggtaaacacaaacataccgtaaaaattaatgctagaacaaaggctgtaatctaaaataatccccaacttatgcacaagttgaggattattttcttatcttttatctaggttgactatctgcacgtgacttgtaatcaccgttttcagtaccaataattagcttttcgccattcttgataaaatcaggaacttgcacaactaagccagtttccatagtagcaggtttaccaccaccagctacagttgcacccttaatctctggttgtgtttccttaacggtcatttcaacagttgatggcaattcaataccgataatcttgttatcatctgtaaagtccatatcaaccataatgttaggcatcaagaacttaacgtcatcacccaattgatcagctgaaacttcatattgatcataagtatcagtatccatgaaagtataagtattaccttcgccgtaaaggtattgagcctttttcttagttacttcaactaaatccactttttcagttggacgcatggtcttgtggacaactgcaccactcttaacgtcacgcaaatccatttgcataacggtattacccttacctggcttatggtggttagcctttaaaactttgatcaatttgccatcttggctaaaaatcataccttttttcaaattaattgcttgtaccattatttcttctccctttaatttaaacttacctttcgactagtttaaacacgctggaggcaaagcaaatttttttatcaacagtaaataaatcgtattcataatacctagtataccaaattagatgtgccgcaggtatatccgatcaatcaaatgtccgtcagtcttatgcaaaatcaggctagcacgttccttggttggcgcaatatattcacgcaagttgaccagattaaccatctgccaggtttcttcagccaattgaattgcatcttccagcggtccattagccattttatagtaaaaattatctggcttatttttatttaatttaagtacttttctaaagcgttgcatgtaccatttttcaatcaaatcttcttcagcgtcaatataaattgaaaaatcgaaaaagtcactagtcacaacttgtccactctcgggcaattgcaatgtattaattccttcaataatcaatacatcaggattttttacatgaccatatttcccaggtactatatcgcttaattcttgagaatatagtggataaacgatatccttctttccacttaaaacgtctcgtaaaaaatcactgagcaaagtcatattgtaactttcaggaaagcctttgcgaggcattaaattacgccgctttaattcctcattagggtaaataaaaccatccgtggtcatcaagtgtacctttaattctggataggttctactgagcaacaattgtaataaacgcgcagtggttgatttgccaaccgcaaccgaacccgaaataccgatgataaacggagctggtgaaaaacttttatgcaaaaatttgatttgtgctttttgcgcattctttttttgttggtaaactaagtgtaagtaactgatcaaactggtatagatctcatgcacgtcggttaggtcaatcacgtctcctaaagacttgatatcagctaattcttctttggtaatattgactttatctaagggagctaatttagcccattcatttctgttaaaactcgtataatttctcatatatcgtatccatattccttctaaaacactaacttattataatagaaagcgctaaaaatatgaaaaaaataatcctattcggcgattccatttttaacggatatcgtaatggtcaaaatacaaacctagtaactaatttatttcaacaggcactaattaattatgcacaggtggaaaacatttctaaaagcggtgctaccacagttgaaggcgtcgattatttggagcaaatttccccagaacatgatctagttgttgttgaatacggcaataacgatgccgcaacagcttggggcattagtccagaaagctacgaaaagaacttggctcaaatccttagtgcagtaggcaaagccattgttgtgggattgtgcaatcccaatccagaaagtgacatttttcaatattatggtgctgaaagactcgatctttttaacaatatcgcccaaaaagtcgcaaaggcacatggtgcacaatttgtggatattttacctgcaatgagaaacttaaaagacaaatcgacatattatcaagccgacgggcaacatttaactgatcaaggaaatgagtttttagttaatcaaatcgtgccagtaatcaaaaaagacttagcctaagccaagtccctcttcatcatcacatgttctacgccgccttcatcaaacggttcgcctacaacttgatagcccaagctatcatagaaaggctttacccgcatttgggcgtgacagtaaactgcatcaatcttattttgccgtaaaaatttatgcacagctgtaatcattttcgatcctagctgttgtccgcgcgcttcttttgacacagcaacgcgtcctagcatccatttaccatcttcttgaaacagacgacaagtcgctaaggcagtcgtctgtttttgattgagtaaataaacctgaacagcaattaggtcctcatcatctaaatctggtagagttatcttctgttcagccacaaaagtcgtgttgcgcaatctttctacgcaatagaattctctagctgtcatttcatcaatctttttaaaagtaaaattatctatcttcatattacttgcctaaccaactattgtttctgccaaaccatttttcattaagtttacgcaattgaccatttttttgcaattttgctaaaccttgattgaccttctgacgcaaagttttgtctcccttacgcatccccacagcgaacaagtccattggcacgcgatcattctgaattaccttgtattcgctacttttagccatgtgagcaatataatagtcggcataaacttcatctaacagaattccttgaattcgtcctgcattcagatccaagaacgaattagaaatcgtatcatataaaactgttttcttagcatgcagcacatcttgtttagtttcataccactgctctgctgttgaaccagtttgcattcctaattcataattcttcatttgtttaaatgaactaatgtcactatcttttttcacaactaaaacctggcgattacgtaaatatggcttgctaaaagctacttttttctgtcgttctggcgtaatgctgtaaccattccagagtaagtctatcgtaccgttacgcagctctgtaacgttcattgaccaatcaatcgtttgaaaagaaaccttaatgccatattgtttaaagactgccttagctaagtcgatgtcataacccgtcaattggccgtttttcttttcaaagcccattggtacaaaactatcgtctaagccaattaccacttgctttttgctggcaatcttattccatgtatcttgagtattagcttctttttgtacgctttggcaaccagttaaacataatgttaaggccaagacgatacctaaaatccattttttcattgcctaatcctcgcttaacggtcgaaccttgagcatctgatccgccacattctctgcaaaattcaagtcgtgggtgataatcagctgggttaaacccgatttttttaagcttaaaatcattttctcaacttccttacgtaaatttggatctagcgcgctagttggctcatcataacaaagaatccgcggtttcatagccaaagctctagcgatagctactcgctgtttctgcccacctgataactcataaggatactgctgttcacggccacttatttgtagacgttttaacaatacacgcgcatcctgctctgcttcagttttactcttttttaataccaaagtgatattttgtaaaacgctcaaattaggaaaaagattataatcttggaaaacaacgccaaccttgcctgaatcataaggtttaccgtcaatcaaaatttcaccagaatcttttgtttccaaaccggcaataattcttagtaaggtggttttccccgctcctgatggacctacaattgtcataatttctccgtctttcaaggtaaaagagatgtcacgcaaaattcggtgaccgttaaattctttgctcaaattttttacttctaacatattctcacctcaactacttgtaataagaaaagtatttttccagctttttcaaaacaaaagcacaaatactgatcaacagtagataaattacacctactaaaactaacggtactagcgttacgtctctggccattgccacattgccggccctaagcaaatcacctaaaccaatgacataaactagcgatgaatcctttaccaagttaattacttcatttccaattgaaggcaaaacaatttttattacctggggaataataatcttggtcatcgtttgccagcggctcaagcgcaaaactttcgctgcttcaaactggccttcatcaatcgattggaagccgccacgaaaaatttccgcaaaataagccgcataattcaaaacaaaagcaaacaaggctgcttgatagcggggaaagacgatatgaataattggtaagccataaaagacaaagatcaattgcaataataagggcgtgccccgcataatccaaacataaaagttaaccaaccagcgtaatggtttaaacttacttttttcacctaatgagaccaaaattcctaatggcgttgctaaaattaacgtccagaaaaaaatacttaacgtcatgcctgctcctgacaaaagagcgggtaaaatttctgcaatatattttaatgacatactctcaccttcatttttctttcctaataaaaaagccctcttaggattaacctaagaggacgactgctcgtgattccacctcatgttcgcacctgctcacgcagaaatgcctcactaggttgatcattttaaaagaaaaaccctcatagccaaacggctacgagggcgaatgtaatcgcggttccacctcatgtttacaaattgctcacgcaacttgcctcaataagttcaataatcaacctttagctataacgggctatcccggattttcctacttttgttcagaagaccaactcacagatgtgattcatactagcaaatatcttatttccaccagcaaagactctctattactttgactagtattactatttctgttctaagttgtttttaatgttgaataaatcttaaatgatctagcaacttttgtcaattatttttcttcataagtatctggatcaacatcaagcaatggactcttttctccagtataaataatatctagcttatacattgcacgagaggtaatagtataaacaagttgagtttcatccaatttatggtaagcagctttagaggcatcccacatgactaccgcatcaaattctagtcccttagccaagtaagaaggcacaactagagtaccatcaactagtcgctgattagcagtcgcaattaaggtcgtgttttcaccttttttagctaattcttcatgcacaaatttagctgcagctaagtctttggtaataacagctgtcgtacgcttattttgttcattattatgcaaaacgttaactaaaacatcaattgcttcatcatcgttttttctgccccaaattataggcttaggacctttacggttaaaggcttcaatcttttcgccttgacgcaaaatttgcttggtgaaattggtcaattccttagttgaacgatatgatttcgttaattgcaccacatcagttttttcaggatcaaataagccagagatctgcttaagtaagctacgactttcatccttagtaaaaatagcctgattcaagtcacccaacattgtaaacttggcccgtgggaaattatacttcaagtaagctaattgaaatggagtataatcttgaatttcgtcaatgaaggcataacgcatctcaaagtcagtcctgcgaccagtgatcatgtcatacaaatataagtaagctgaaacatcattcatggcaatatggtgctgcttaaagttattcttaacttcttccacatgagccaaccaatcattttcatcaatattccacttagatagatcaaccatcttaggtacagctcgcaaaaagctcaggtattgtgctcgcatattcaaaaagtggttgtgcaaaatacgcttatgcacgcccttcaaggctgataatacaatttttctacctaaaaaggcctcttccttagcctcagactcaaattcttgatcaggtcgatcatataactcatttaattcagattggctcattccttcaatagcgtgtgccacccaagccttcttagtttctggcgtaatctttcgattcaacatcttgatcaattcttcacgcgttgcatcaattcggttggccaacttgtaattttcattgaaagaataatagatctccttaattttttccttatcaaagtaaggtttcttcttatcacggaaataaatattcttaaaaataacaccgcgcttattcaagtgctctgcataacgagtcaacaagttaaagaaattaactgaatccttaaacttagaaatattgctgtctgcggtttgatcttcaaactgtctgaataagttttcaacttccatacctggcaaccgtcgcgcaacaaactgccagtaagtcatttgaaccatattttgttcgcccatttcaggcaaaacattcttaatatagtcattaaacaactggttaggactgaacatgattacatcacttgaagtcaggttgccacgataacgataaagcaaaaaggctatccgctgcaaaatcgcactggttttaccagaacctgccgcaccctggacaaaaagcagatctgctttggtgtttcgaataatcttattttgttcgcgttgaatcgtcgttacgattgacttcatctgcgttgatgatttttctgacaaaacttccaagagcatttgatcaccgattgactcatcagtgtcaaacatgttcacaatcttgccatcttcaatcataaattggcgtttcttagtcatatcaactgtaatttcaccttcaggcgaattataagaaactttacccaatttaccatcataataaattgaagatattggtgcccgccagtcatagatcaagaagtgatcgtccttgtctgcaaaagaacctagaccaatataaatcgtctctgttcggtcctcatttttttctttaaaatcaacccgagcaaaatatggtcgcttctctaaacgctctacagtctctagctgcttagctgaatgttgccaagcatgttcacgttcactcaataattgttgctgctggtggattgacagtgctgtttccattgaagtggaataaccatcataatccaatttaacatcgtcaaaaaagtgtgaattaagctctcttgcttcgccttcagctgatttgatagatttttttaaagttttttcgcggtccttgatctgacccataatattatcaaggtgcttttgttcaagttctttttcgtttttttcagttttggctgtagccatctaatcaccttttctttaaaaattcgcataccattttaccatgaatagcgctttcataatagttttcctgctcgtgagaaaaatataaataaaaattgatgaaaactttaactttagagactataatcttgacatattggggtgatatatacatgaaaagattttttaaattactgagaaatgttctcttgcttgctcttatcgctcttggcgtttggacttatcagaacaatcccaatattcgtatcgcaacgcaagactccctagctacacttagctatcgaattaacgaacttctaactaacgaaacgaccatttctcccaataacgaaaaaaagactactaatatcaaaactgacacagataaaacagaaaatgacgattcttcagacaatcgtgtatggtcaaatcctgaagctaaggtttatatcgatattagcaataatgctcaactaagatcagctgcagtcaatgcaatgaacgcttggaatcgtaccggtgcttttacttttcaccaaataaatgataaaaaagacgctcaaatcgtcattaatacagtcgataatagcgacactaatgccgcaggagaaacagcaactacctataaccctgctacaggacatttgttaaaggccacggtcaacttgaaccgttactatttgcaaaacgaatggtatggttacagttacaatcgaatcgttaatactgctgaacacgaattaggccacgcaattggcttaaaccacactaataatgtctcagtcatgtacccaaagggttcgatctatacgattcaaccgcaagatattaaaactgttaaaaagatctaccacgaaaataattaactttaaaagctcacctcttttttctacaataaagtgtgagctttttacgaggagaaaaatatgaaaagaatttatatcgtccgtcacggtcaaacttatatcaatcgctacaataagatgcaaggttggtgtgacacaccattaactacaccaggaattgaaggcgctgaagaagctggtaaagctttaagcgaagtaccttttgacattgcattgtctagtgatcttaagagagcaagtgatacctgtgagatcatcatgaaatataacgccaacaaagacgaattgcagcacatcgctagtccatttttcagagaacaattctacggctacttcgaaggaatggattccgaaatggcttggcgaatgattggtggcagtcacggctacggaacacggcaagaaatgtttgctcatgagagcatcgatactattaaggattggattaaagaagccgatccttatcaccaagcagaaaacgctgaagaatattgggctcgtcttgatgatggttttaaattaatcagtcaattggatggcgctgaaaacattctgctagttactcacggcttcactattagaagtctctggtatcgttatggtgaccatattcctttggttccaggtcctaagaatgcttcaatcactattatgacaatgagtgagaaaggcgaaattaagatacctaagtggaatttaatgcatttatagcaaaataagattaggcgaatcgggcctaatcttattttgtttgtttcccggatttaaaattgaagtgcaacactaagtgttaaacaaaaaggccatgaagacctaaacttgaagtgacgaaaaatcaagaaaggaagatcttcatgaccaattcaaattctagcatttctaagcactatcatcaattaaccagcgtacaacgtggacaaattcaagcaatgctggattccggcataacttcccgtactgttatcgctcaagaagttggctgccataagtcgacaatcagtcgcgaaatcaaacgcggaagcgtcctgcaaagagacagcagctatttattgtatgagcactattacgctgatactgcacagatttattatgagaagcgtcgcaaaaactgctatcagcgcaatccattgaagcattatgctgtctttttgagaatgctctccagacgctttaaagctaaatttgatgccaccagcatcgatgaattcgttggtgaattcaaaaggactatgccaggctacccttgtcccagcacaccaactgtctatcgctatattgatcagggcttgctggacataagcaatattgatctgcctatgaagctcaaaagacgcaggaacaagtgtcatcacggccatagcggtcatgctttgcacaagaagcatcttggcaattccattgaacagcgtcctaaagagattgaagacagaaaaacgccgctgcactgggaaggagatctggttaaaggcgtcagacgcaagaatcagcctgctttaatgactttgaccgaaagaaccacacgctttgaagtagttatcaagattcctgactatcgggcaagcacatgccaaaggctgcttcaaaatgagattgacagacatcctgcctggtttaaatcgatcacgtttgacaatggctctgagtttgcggatatgaccgagatcaaaggctgccagatctacttcgcccacccatattctccatgggaaagaggcaccaatgagaactgcaatggacttctgcgtcaattcttccctaaaggcaaaagcatgaaagataagtcagctgcttatgttcaacaggcaactgatgccattaaccgcaaacatcgtcgaatccttcaatatcacacagcagaagaactcttcaagcaatatatttcctcatagcctaactgttgcacttaatttgacaattcaggattttgtttgtttaattatttttgcaaaacaatatttttatatagcttcactgttattaaaaaacttcctgaaactgtcaaatcttttgtgtaaatagttctttctcgtaaattgattttttaattatttatttaatcaaagtaggattctaaggtgtcctgaacctgaccaaagcctttatgaattcgattgaaataacggtcattgtagctcattgcctgaataccaataaaagcatcaagcgactgttcagttggaaactctgccttaggcttagctttgcgcttgatcacattgttaaatgattcaatcatgttagtcgaataaattgaagctctgatctgcttgggatagttataaaagaccagcagatctggttctatgtctttcaagcttctgataacatggctgtaaaccttgccccatttggtatagaagtcatgcaggacagctgtggcttcttctttgtttgtctgttgatgcacctgtttgaattcgttcatgatcttttcacgatcgtcgacgcgtactttagcgcagatattgcgcatgacatgaaccaaacagcgttgaaaatgagctttaggataagtcctggccaaggctgttttcatgccaacaacaccatcagaaagaaagagttcaacttgcttcaagcctctggacttcatgttttgaagcatctctgtccagacttcaatgttctcactaggagcaatgcagtagtcaatgacttccttatgtccattaggtttaatgccaatggcaatatagactgcttcacgctcaacgctcaaacgtttctcggcgcaaaggaaggtatgtcgcatccaaatagacgcagaaaaacttgtcgcttagcttgcgtttgtggtaagcctcaacctttggaatcatctgcttggaaatatttgatacctgagctggactgtaatggctgccatacatcttttcaattagatcggctatttccctggtggtcacgcccttggagtaaagcttgataatcatgctttccaagatatccgagtgctgcttgtagccaggcagcgtgtgctgatgaaattgaccgttgcgatcccgaggcacttgcacttcaattgggccaaattgcgtatcaactttgcggaaataagcaccatttctagagttgccagtattccagccatttctggcatagggatcatagcccagaaaggcagtcaattcagcttctagcaagttattaacagcctgttgtagttctttgcgcaataaatcatttattttgtctggattgaatagagcttgagcaaaatctttggtaaaatcattcatgaaggagttcttctttctgtatgtgtttttttgttcaaaccaatcatacgagaaaggaactcctttttctaatgtttaaagaaataaatttaaggaatcattcatccttacacaaactattttacagtctcaacttcctactatttttaacagtaggaagtcttactctaactaatctttagtcacttgttttagtttttattaacttacagtcgcccaaagtctgaatcaattgtttgccatctttttggtggaaaacagcgttttgatacgacaatcgttctttctttttactcttatctttatactttttaataaaggttacttcatagttaatccgactataattacgcttacctggtaaaacagagagcaccttgatctttacacttaatttcttgatactcttctttttatgccattcctttagttgcttagcaatcttcttatagtctgcattttcttttccattttcaaagtcatctgcatttggcgacttaagggtgttgtacaatagcttagctgcatccccaaccttaatcaagccaggccaaatcgggttaacaatatagtcaccttctgcatcctgatagacatctttttcgccattgccttgatattcagcagtaccatcataatcagtgacgtcatcctcactattagaaaattctgaactaatcgactgcgacaaatccgttaccctttcggacttaatagtttgaccatctgccttactcttaatatagatttccattcgcttagcaatcggataatccttgaaagtatagctaccatgctggttcaatttacccgccttacgatcattgatatagatcgtaccattaggaacgctgcgcacttggaaagtggccgttttgatcttcatatcaacagtcttatctgaccaaatgttaacaatcgaatcagcatctaaatggcgaccattaaccttagatttaactaatatatgatagcgaccaggaaagaccatacctaaatcttgatagtaattctgattgccaccttccatttcaccataatccttttggttaaccgtcaaagttgaattagcgtgattggtcttcacctgtgggcgatatacttgtatccacaacttatattttggaaaaagcaaaaaattgcgtccatcttgaatcagtctgatttcaccatgatcgcgattatgacgcaaattataggctaaacgtttagctgcactgtgatgctctttaaagtaattttgaagcggcttcagcgatttatctgtcacatccatatcaggcgttgaagccgtgacatactgagctagctcagttttaggatcctgcattttagctacaatgcggtcaatttgacgttctttagtgtaataaaaattgccaattagccatgcaataccaattaacaggataataactcccgatatccaaattttcttatgttttttcattgatcaaaacaccttttcacaaatccttttaacttagattaacaagttgatcaaaaaaagcaaacatcttttgttcacaaatcaagacgaagttcttattatatttagtagcattattttattttggaggggattgcacagtggaagtaaattttgattttgtaaaaaatagcagcttcaaggaagcctttcctaccgctgaaaaaatccacaaattatacacaattgatgattatcgtgacgttatttcaaattcacgtcttctattagagagtctaatcaaaaaaatttttaagttagaaaatctcagtccatattacacagttcatgatggcgaacaccgtaatttgcgtaataatacacattatttacgcaatgaactagattaccctctttcgatcatggatttatttgacgaaatacgctgcatgggcaacgctgctgtccacgataaccaaattgaaccagatcaaaagcaagcctggcactgtatttgtgatttacacgatattcttgtctttttaattaacagctatgacggtcaagacctatattatttgcgtcccgatattgcgatggaagcacaaactgatgaagaccattattatgtgcgccaaaataagcaaccaaaaataatgaaattgcatgatcatcaaaatactaagaaaaaacagtccgcatctgcaccaaaaaaggcgaaacatgttaaacatttttccagtaaacagcatatagagcaaactaactctgagtcacaaacgaaaactactccttccactaaagacaattggttaagaaaaattaaagaactctttcaccatgattagtcatattgacactatgtcacaatatgataaactatatattatataatttacataccgagaagcgcctatgacgctgccgatacgcaaatgaaaactgaacaagtttctcaaatggggaacggcttatgctagtaggtcgttttccattatttttttacgaaaggagtggttagtccgctatggataatcacaggcaaaaaccttgggctgtcgaacagtctgaggtattaacaaatacaaaaacaaccgaaactggtttaactgaagacgaagttcgaatacgccagcaagctggtttaaacgagctcgcagctaaacctcttaaaacagtaatccaaatggtcaaagagcagatttttgatccaatgatcggtatcttattagtagctgccctcttatctgctatgtttggcgaatataccgaagccattattatcgcgacaatcgtggttcttaataccattattggagtagttcaggaaaagaaggcacagtcttctttagctgcgttatgtgacatatctgcgccaactgcccatgtaattcgtaatggcaaagaattaatcataccggccaaggaattagtagttggtgatattgttaccttgcatgatggggacatggttccagccgattttcgcttaattgaaacagctaacttgaaaattcaagaagcatcccttactggtgaatcagtaccggtagaaaaagacgcagctgctgttttaaattcagattgtgctcttggtgaccgcatcaatatggctttttcttcctcaattgtgacttatggtcgtggtcaaggcgtcgtgacagcaattgggatgcaaacagaaatgggtgccattgctggcatgttagaagatcaaactgaagtacaaacaccattgaaacgcaaattagctaaagccggcatggtcttaacgactatcggcttaattatttgtagtttggtctttgcaattggtgctttctatggccgtccacttttaccacaattcttggttgctatctcattggcaatttcaattattccagaaggtctgccagcaaccgcgacaattgttatggccttaggcgttaaacgcatggttaagcgtaacgctttgatcaaaaagctgccagcagtcgaaaccttaggtaacgccactgtcatctgttccgacaaaactggtactttaaccttaaacaaaatgactgttacacaggcagcaacgaatgacttcagccaaagtcacgtagttgaccagcttgcagcaaacaaaaccaatcaaactttggcctatgctagcgctctttgtaacgatgccagcttgaacggtgaaaaagagattggtgatccaactgaggtagccttaattccttttgcccaaaagcttggctttaaccaatctaacttaaagaaagaattcccccgtttgttcgaacaaccctttgattcggacagaaaacggatgacaacattgcacaaaattgacggtcaattaacggtcttcactaagggtgcaacggacgaaatgttgccgttatgtacacacattatgactgacaatggcgtgcgtaaaattacaccccaagacaaaaagcaaattgcccacttgtctcaccaaatgcaagctgacgctttacgagtactaggctttgctaccaaaatagtggataacttacctgaagcaaatgctgatttggaaaataatttgacttttatcgggattgtcggcatgattgacccaccacgaaaagaagttgcagcatcagttaaaacctgccgtgaagccggtattcgcacaattatgattaccggtgaccacaaggtaactgccttggcaattgcgaaaaagttaaacatttatcagacaggtgacttagcaatctcgggaactgaattagaccaaatgtctgatgcagaattagatcaagctgttgaaaaggctaccgtttttgctcgcgtttctcctgctgacaaactgcgcatcattcaaagcttaaagcgaaattgtgaggtaacagctatgaccggtgacggagtaaacgattcacctgccttaaaggctgccgatatcggtgtcgctatgggtgtaacgggtacagacgtggctaaggacgtggctgatatgattttgcttgatgatagttttaccacaattgcgcacgctatcaaggaaggtcgccgcgtttaccgcaacatccaaaaagtaattcagttcttgctagttggtaacattgctgaaattaccactttgtttgcggcaactatttttaactgggatgcgccattattggcagtacacatcttgtgggttaacttagctacagctactctacctgcccttgctcttggcgtagacccagcaagtaaaaacattatgaaacacaagccagttaaagctggtactttattcgaaaaagacctagttattcgggttattacccaaggaatatttgttgccctgcttactttaactggttacttcattggtaaagaaaccggcaatcaagttgtcggacaaaccatggccttcagtattttagcattggcccaaatgattcgttcatttaaccagcattcaaatactgatcccatctggaaaagatcatctggtaataatccatggttaacagtgtcattcattatctctgcatttttcatgggtattattctctttgtcccagcaatgcaagatgcatttcacattaccagtttgtcagctggacaatggttaatcgtagttaccctagctttactttcaattgcacaagttgagttagtaaaaggttgggcaaagtttagaaatatttttattaatgacaataatttaattgaagattaattagttacaaaaagacggtagtacaacactatcgtcttttttgatattaaactttggctgctgccaattggtcaacatctatctgactacgaccaatctgaattgccttttcggtactttcattcaagctagcattgatcatcttatggctaagctccagcaccattggcaaattaacaccgctaattacccgtactcgctcaggatacatatcttcatattccgaagcgactaagtggggtgtcccattttttaaatcagttagcaccaaaatctgactattctgatatttattcatgactttagcaaaacgagccttaaaatctctgattcctgtgtcgtttaattcaattgtcaggatctgatcattcttgcctgccaacatatcatgtgcagacattagccccgcagccaacccttcatgagttgcaattaaaagttccataaaacgcacctctttgtaagcgatttctatagaaccattttaacatatttttgtattaattaagctgttcaatatctgctaataagctactttgttcaggtgttagccgctcatccttttgccgtaacttaagtacttgtagacaagtgtgcaaaatcttttttccttgttccgtcacttgtttgccatccatatcaggcgttacactggctaaaaagtcatccatctcatcagcagtaaccttgaaaacatcattttctccatgaatcaagggcatccgattgagcatttcttcaatcatttgtaatttatttctagcttcttcaaaatctatcttgttcacatccaattctttttcttttattatacaaaaaaacagccacctaagtgactgtcatctttatttcgtattaataattgcgtttgaaattgtagttgcattagattcgatcagttgatgtgaattattaataaaaagggaagccccaattcctatagcagcaaatacaagccaaactttctgtaaaactgtactcttcatgttcccagctccttatatttcttattatataaaaagccgatcgttatggggatggctacgcttacaattaacataattgtaatattatttacctttacttaagagttacttctccagcaacatttgtatcaaaaaagtcagcaatttgatggacgtccatcccttgccctaaagcccacattaatttggtaatcgcactctcagaagtcatatcacaagcagaaatagctccttccagtaaagcctcacgccccacctcatatttggtcaaatcgctacgttcatacaagcattgactgctggctacaacgggaataccttgacgaattagcataccaattgcggctaccatgttgcggcgaataaagttcatcccgcctagaccatatgcttcaataacaattccacggcaaccactattaaccatcgcaaaaagcagattaggatcaaagcctggaaatagtttcaccaacgatacgtgtgaattaattttggtattcaaggttggctgaccgtcatgttctctttgaaaatgttctgaattaaaaactaatccatcggaagaaacggttgctactggtggcacattcacactttcaaaagcatcaaagttggtagtccgcacctttacactgcggcagcccagcataactttattatgaaaggctaaataaacatcaggtggacaagttgctgcagctgcaaaagccaaccgtaggttatcgtgagcgtcacttaggaccacgttaattggtacctgacttcccgtcagcacaaccgggatattaatatttttcagcataaacgacaacattgatgccgtataagccatagtatcagtaccgtgtgaaacaacaattccatcgtaatcattgcggtatttgtagatattttctgcaataaatttccattcttctggttggatattagaagaatctaattgcaaaatatcgcggacttgaatgtcgtacggcaactttcccaacattttaattaactcttcaccggtttccttgggtactaggcctgcatcagaagcaacggaagcaatagttcccccagttgatagcaataatattttcttcatcttgttcccctttatctcaaatcacaatgtcgaccataactattcatgattagatcaattaaaacataggccgaactaaaagttaccgcattttgcttactaaattgaaatggcgtagttttgaagaaaaagctatagtcgctaagagaggctaattttcccgtttgccagctagtcagtgacaccaatttcagttcagtattcacgacatcaatcttcttaagttcttcaataattgttttattaaaaccaccaaatgaaataacaaacagcatgtcattttcccgtgcagaccgccctaataatgccacttcgtcgcgtgcactaggcaaaataattgcttttttaccaattaagaaaaagttatgcgccaaatattccgcgataatttgctgctgccagccagtagagtaaagatagatcgtttccgcttgatctaaatccgcaaaaaatggttgtaagtttaatcccttaaaatatttaaaagtttcagcaatgatcttttgtaaatccgtattgaaatctagcgtttgcttgttcttaacgttttgctcctttcgtgtagctaactcggacaattcaaatttcaattcgctgaaaccgcttaatcccaattttttgcttaggcgaaaaatagcggacttagaaacgtataatttctgagctaattccagcaaactcaactgacttgctacttcaggatatttcaataaatagctaacgatcgctttatcggtctcattaaaactttcctttttcttcatgaccgctgtttctaaatccattctgtttcctttctcatcactgtttcttattaagaaaagaatatcatgtcgtactcaaaaaaggtagccaccctatttgagtaactaccttaatttttattcttgaattgaagttatgttatgacaattaattatttaagttctggccagtatggagcattaactggaatcatgtcatccaaaatcttcttagcaacggaagcatctggtacagtcttgtttaatgcaaatgcttgcagcatcttattgtatgaatgttcaacataagcatcaacaaccaatttttcacaagtttgttgttccatcatcaagcctctttggaagcgacctgctttacccgtagccattggttgaatgccatcagcaccaaacaatgctggtacttcaacaattgaatctggatccatattagaaattgcaccgttattagcacagttagctaagaacttttcatgagtgttaaatgcgatcgcatgacaaatatctacgatatattcagagtgcaaacctgaaatatcccaaatattattcttagcagttcccacctttacgattctttcacattcgccaaagacaatcttttgccggtgttcacgaatttcatcagtacgagtatgcttcggatcagcattagcaacttcatattgtgggaagtagtagtattgcatgtaattgtttggcaaagtttctggctctagcttatattcatcggcaactttcttaaaggtggcttcccaagaagcttcagtatccttgtcgtaatcgccacctacccaatagccgtgctctttgacatattccttcaacttaggcattaagtcttcgccagtcttcttgttgcgaacttctttccaccagccaaaatgattcaaaccataatagttaaagtcaatatcatgccaactgtccaaaccacaaatggcagccattctgtccatatcatcaatcggcatatcacaaatgttaattaccttagcatttggacgaagacgacggcaagcttctgcaacgattgcaattgtgttggagtagttgatcatccaagcatttggtgagtattcttccatccaatcaataatttgcaaaattgcgggaattgagcgaagaccataggccattcctccgggtccagtagtttcttgaccattcacgccatattttaatggaatcttttcatccaagcttctcatgtgatatttaccaacacgaattgatcccataacaaaatctacatcagtaaaggcctctttaggatcagttgtgtaagaaaacttaatttgaggtgctctttccttcatgataatttcaacagctttggcaatcttttcttgccgttcagcatcgttatcatagaacttcaactgtcttaatgggaatttatcctgactcttgattaaatcaaggacaaatcctggagtaaaagtactaccaccgccagcaataactactgaatatttcttaccatccataatctattttctcctttaaataaaactaagtttttatctctgtttcatttgccttacgcatatatttatatcatcttctcccacaaatgtattcgttttcaccagcttcagactttgtttcaagttttggaacgcgtttcactacgcgaaatatttttaaattttgccttaagcctaacaaatcaggtgtttaacttgcctttattagtaatagtgtaaaaatgaaaaaaataatcgtttcatgaccaagataaactataatttgaacattcctttaaccacaaaaataaatagtccgtatttgatgatcgtatagttttaatgaaactgtcaaatcttttgtgtaaatagttctttctcgtaaattgattttttaattatttatttaatcaaagtaggattctaaggtgtcctgaacctgaccaaagcctttatgaattcgattgaaataacggtcattgtagctcattgcctgaataccaataaaagcatcaagcgactgttcagttggaaactctgccttaggcttagctttgcgcttgatcacattgttaaaggattcaatcatgttagtcgaataaattgaagctctgatctgcttgggatagttataaaagaccagcagatctggttctatgtctttcaagcttctgataacatggctgtaaaccttgccccatttggtatagaagtcatgcaggacagctgtggcttcttctttgtttgtctgttgatgcacctgtttgaattcgttcatgatcttttcacgatcgtcgacgcgtactttagcgcagatattgcgcatgacatgaaccaaacagcgttgaaaatgagctttaggataagtcctggccaaggctgttttcatgccaacaacaccatcagaaagaaaaagctcaacttgctttaagcctcgggatttcatgttttgaagcatatctgtccagacttcaatgttctcgctaggcgcaatgcagtagtcaatgacctccttgtgcccattaggcttgatgccaatggcaatatagactgcttcgcgctcaaatgtttctcggcgcaaaggaaggtatgtcgcatccaaatagacgcagaaaaacttgtcgcttagcttgcgtttgtggtaagcctcaacctttggaatcatctgcttggaaatatttgatacctgagctggactgtaatggctgccatacatcttttcaattagatcggctatttccctggtggtcacgcccttggagtaaagcttgataatcatgctttccaagatatccgagtgctgcttgtagtcaggcagcgtgtgctgatgaaattgaccgttgcgatcccgaggcacttgcacttcaattgggccaaattgcgtatcaactttgcggaaataagcaccatttctagagttgccagtattccagccatttctggcatagggatcatagcccagaaaggcagtcaattcagcttctaacaagttattaacagcctgttgtagctctttgcgcaataaatcatttattttgtctggattgaatagagcttgagcaaaatctttggtaaaatcattcatgaaggagttcttctttctgtatgtgtttttttgttcaaaccaatcatacgagaaaggaactcctttttctaatgtttaaagaaataaatttaaggaatcattcatccttacacaaactattttacagtctcgttttaattacaaaatacgactcaaactagtttcacttccatattttgtagtgtaattttgaaattaattataattttaatatctttctgctattttctatacaatataatatttttaaaacatatctttgctaaacgctgattttatcccaactcttagtcattagtacttgataatttacagataacttaggttataattatatatttttttatataaatttagcctttatcaaaaaactttcgaattatttattaaccgtatagtttttattttaggtcgccctaagtcttgataaactagtactctaaaaaaataacatccatgttttttatttaacacgatacgttattaaagcttttcatgtatagactttgtttttaataatgttagtatcattccatgaagagacatataacgagctttaaggaattgactactccttaagcaaaaaaatgacttataaattggaaatccttttcgtaatataaggggattaagaaaaatgacaaagaatgttaagctattatcacttatcggtatcgcagccgctttagcaggtggaagtgttgctatttcaaataataacaactctactgttcaagctgcttctatcacattacctgctggttacaccaagagtgccattattaaatggaaccaaactggtaaagcaagtaaggctttgattgatgcttctaaaaaaggcatgaaggaaaacaccaatagtgatgcgggttcagataatacgttagttaacgtgactaaattaactgcgtctcaacaaaaagaactgagccaatacactttaagcttaattaattctgcacgtcatcaacttggcaagcaaggctggacttacaaacgaggtgctttgcactttgcaaatcgtgtagctaacgaatactacagccataacagatcttgctgggatgccgaccactatgttactggaattgaacgcgcagctaaggcttctggccttaactcaaaagtaggtcaagtctacgaagatgaagctggcttacctatctcttcaacatacaatactaacttacgtccaatgtcagtattgaaaaaccaaatttactttaacgtaaagcaaatgctttttggcggttttgcaggctctgacagtcagatgaatgactcatctagatacactgaatgggaacacgctggtgatttacttggttgccgtactaagagctacgatgctaagactaaatactttggtattagtttcagtggcttaaagggtgaccaaagcaaggttagtgttaacatgatgggtgttgctaaatgttacatccaaaactacagaaaattcaatcattaaaactaacgctgtagttaaaaacttaatacagtttcctaatccaagagctcaagtagttcagtcaactatttgagctcttttatttttgcccatttttcatcaaaatcctgtcaaaaaaatgcagatattcacacattttcaattaagctatctaattgtttgtatacattagctaatactaatagtgtgttaagttattatcttattactattttgtctataatccttgataaatcaatgtttccagcaataactgtacataattaacaacagtacagcaaattatgattacaattaataaactttttcaaaagcatttttacgttatccatgcgggattttcgcttacacaatctattacattattgttatctaaaaaaaggattgctatattaaatagtaactggtatattctatatcaatatgttcaatgaacataaaaaagggaggataaagatgtatttcactactacaagaagaaaaactaggaaagacaggatacatatccaattctttgcacaagtcttaaaaaaagacctatcacaaggaactgtttacaagtattcagttcaaagattctgtgaagctgcaaatatctgtcgcggaactttttaccgcaactttaaaaatttgaatgatctatttagtcaagtactgcaattcgaaatcaattcttgcttcaacaatccccaatcaagtactttacataaaaaagcacacaacttactgatagaaattgaaactaatgccacctactatcgaaatgtacattctcttgcctcaagtcaaattcgaacacaagttgaccaagctctttttcgtgaaatgcaaaaattgctattcaatagtaatctttctaataagcatatccaaagcatttccagtttgattcttattcgaattctagactggattgctcatgactatcaggacaatgtcatcacagtttatactgacgttgaatgcctttttctccatcacattaaaaaaagttgctagcaacgaataccaatgtcattaagttaagacattgacaattaagggtgcttttttagagatcgaatcatttggattcgatctctttttttgtataaaataaaggcgaaaagaccagccttttcgcctatcttatatattatatattttaaaccttcaaaattattgccagaaagatggtgttaattatgaaagcccttcataagaatattctagaacgtcttgatcaaattatcaataatactggggatcatattcacgattttattaataatcctcatgcttttaccaggaaacgcactttagatgcagcgacagtccttaaaactacaattaacatgcaaggtcagaatttaaacagtgaactctttagagcttttggcgaagatgcaactaaaaagaacgataaagtagttagtacttctgcctatgttcaacgcaaaagccagctttctcctgcttgttttaaacatattctgactgtttttaatcaaaatctatttaatattcaactttttgatcatcactaccgtttgtttgccattgatggctctgactttaatcaaatctggaatccgaaatcgaataacattgtacaagcttcttctcataaaaagaaaccctattgtcaaattcacgttaatgccttatatgatctattgaataatacctaccaggattgtatttttcagcctaaatcagaaatggatgaacgcaaagcggctgttcaaatgcttaaagctttgaattgtggtccatatattgtaacaatggatcgtggctacactagtttcaatatgattgaaaactgcaatcgcctgcctaactgtcattacataatacgaactaaggctggacaaggcggagttaaagaaataacgacattgcctgatcaagaatgtgatcgtgagatttcctgcctggtaactacttctaactattactacatcacgcataaagccagtgagaatattcaccatgtccagcatcattatcgccaatatattaagtatcgctctaaaaatacccaggatctaagctgggattttggcgagttatgcacaataaaatttcgagcctgcaaatttagaattaatgatgccaaatcaggcaaagaagaatgggaagttgtgctaaccaatcttgatcgaaaaaattatccgctaaaaagaattaaagagctttatcatctgcgttggggtattgagacctccttcaagaaattgaagtattctttaggcagtgtacagttccattccaaacaagataaatttattgaaatggaaatttatgcccatatgattatgtttaatgcaatcagtcaaattgatgcacaggcctatattccgcaaaagcattgcaagtatcaatatgccatcaatttcaagcaatcatgcttgattattcagagcatgtatttggcttcttctttaacgcaagattttgaacggatccttattcagatcagctattataccattccaattagaccaggccgcaaggacaagagaaatattaagcccaaatcagctgtatattatttatatcgcgtagcttaaaaaagcagaatctgtgctatgccttatttgttgtacgaaaaaagcaccaatttaaccaattaaatgttaaatcagtgctttaaaagtctaatattaattgtcaatgtcttaacttaatgacattgcaacgaatactagcaactttttacattaagcataaattttacgttttaaaataccgacataaggtaaattacgatataagccgttatagtcaagaccataccctactaaaaatgcatctggagcttgaaaaccatagtaatcagcatggaagtcaactactctagttgtcggcttatcgagcatcgctactacttcaacactagcagcaccgcggtccttcatcacttcacttaaagcttgaagcgtacgacctgtatcaataatatcttccataaaaattaccggttgatctttaacatcagattttatatcttgagtgatctttaccttgcctgttgattcggtaccggcataacttgaagccttaattggatcaactgtcaatttaaagttaagtcgcttgatcatgtcactagcaaaaatcattgccccatttaaaacgggaatgacaatcggctgcttgccctcatatttttgattcaattcagcagccatctcatccatgcgcttatctaattgtgcttgatcaaacaaaattttctcaatgtcgttattcattatctgtctaccctttgaattcataattttaccaatgatccgattctagcatgattttgaattgatttaaagctttttagtgcttaaattgcataatttgttcatttattgtctatatggactataaattgttcgggtttagtggaagatagtgttttagtaattgaatatcacttttttggataaacataaaaacagcattctttcagccaatgctttaggaatactgcttttatcttaaatcttcttaatcatatggtcataagtacgatcgccaatcgtcatcgatttttcaatttcataacccttatgcttgtataaagcttgcgcacgtggattttctttgtccacatttaagctgataatatgatagccatgagctaacgctacttgttctgcctcgtccatcagacgactagcaatgtgttcaccccaatggtcgggatgtacagctaacgcatcaatataccactcgtgtggccaagcttcttgatcatcaaaaatcacggttgaaatgagtaaaccagcatttgcatagttatggcgcaagacaacatcgataatcttctggtccttataaggatacatatctaaaattccggtcaccttaccatgatcttcagctacccaaattcggcggtatgaatagcgataatcctcggaaatgaaccctaatttcattaagctatagaattgatcttctggcaaagattcaatcgacttcatctgcatttcatcaaaaatttgctttaagatgggatatacaaaaggaaaatctgtttttcttgctcttctaatcatttttctccctcaaaaattactcatcgtcatgatcattatcaaacaaatcaacatcatcaactacgtcaaacttaattggatgttctggctgatgcttcaacatgtcaagcaaggtagttgccttaggttccaataatttgctgtcatgcattaaacgatacagtgcaaagacctgtgcatatgtagcccgaatcagcaaaccatcaacctgataagcggcatcattatcgtctactaccattgatgtagtcaaaaagtcgcgcatctttctctctgcataatcgtcacccatcatttcctttagtgctggatccatgtcggcgtatgtatgtgacagcttagtaactcgttcaaaattgtaagccaaatcaacattaatccgttcaagactgtcctggtctaactggccttgattcttgcggatttcattagctaaatcatcgattgcttcaccaaatgcaccaaaaacataatcaagtgtcaactgggtctccaactgctctggttccatatcgactaattgtgctgcattctgtgcattccaggcaaaagatgggctcaaaactcgtcctggtgtctggaacaaaattcctgtcaatccttgcttagcagaatattgaacgttaattgaaccaggctcaaaatcacaacgtttggttaaatttcctgcggcagactgaatcttagggtatagttttgctacaattcctgaggtgtcgccttgatcactgtcgatgacgattgaaccgttttgccaggtatcatgcggattattttcatccaaaacagagaaattcgggtcaggagtaaaaccggcatcaatgtcttgattaggtacataaatcagggaatgacctaagaaattagtgattacatttgcatcttgatcgtcactgattgagtcaatataagccatcaagctgtaaagatagccatagcctaacttgttgataatctcaattaattgatccttatcttcgttgtcgctagcttgaacgtagctattcagcttttgccgcaaatcatctagcgtccgttcattggtgttagacaagtagccatcgacgtcagggatgctgtaagaaaagccgaaaactaagcgatacaagtaatccagatcggcacaataagcgtcccaatcatcatcactaatctgacctgccgtatcttgcaaatcgcgggcaaaattaaggataaacgaaatggctaaatgagccgcacattgctctacactctcattttcaatcattgttgcaatcttagtacctagaatatcatttcgaaaaatcatcacatcattaggcgactgcaaatacacaatcaaatcgtgctgctcttcgtcatattccacgccaaaagaatctgcagggatgagattattttgcaccaatgcttcactagcctgacggaatttagcagccaatttttcagcctctggtcgttcaatcggatcgcctattagattgctatcttcattgttacccacggcttgatcagccttatccggcgcattttttaatagagaaaaatcaggatctggcttgaacagatacgaatcattcgggatctccattaccatatgatagaccacgcgaccagctgcttcgtcatcatcagttgaacgttgcacttccttaggaatcgccaataaataagcgtcaggcatttgggctaattgagtttcagtctgggctaaaatatctgccccatatagaccactagctgctaaaatgctctgcaaattttctcgcacatcggccgtggacattttatccgtgtcacggtaatagctgttaatttcggcatttttttgcgtcaatctataccaagcgttgtatagataatccatatcctgacgtagctgcttaggatcaagatccacacgctcttcaggcttcgttgcgtccataaaactgccagccaagctaacgataatcccctcaccgttagaagcatcatcttgttcaagaatgtagccataagtctgatcattcaagagcaggctaggaatagtcaagttgttaggtgtctgtaagtaaatcaaaacactgtcatcatcaggattaagttcggcgctcaatgaattagggacaatgctgccgaggctgtaaatccaaccgattgcactgtcgattttgttaattacttgttttagttttgcatcttcagtcatggaaaaactccttcattattatcgaaaaatgctgtaagcaattacattttcacatatttacgcctcgattgcattctttttgccggttggatttggttttggggggttgaattctattttttaagcagggaggggaataccaaaatattatcaaacaaaaagtcctgctttcatagatagtacaattttatatatttgtactgtctactaaagtaggactatatcacacaagccagcgtctttaatttttacatctaagccgcaggaatattcttcagctcattctgctcggccactctaaagaatgggagataaatcacaatacctattgcaatcaaaatacactcaaaaataatgtttctccaatccatcgagctcatgtaagcctggaagaagaatggagtaaacgatggatcaacaatataacccattccaatccagtgaagactttcagcaaagtaagtcaacacaatgttaataactggtgcaatcaagaacggtattcctagaataggattaaagcaaattggagtaccaaaaataattggttcattgatactacaaatgcctggaataattgaaagcctaccaagtgcacggtacttttcaactttactattcatcataagaatacacaaagccaacgaattaccagaaccacctaagacagcgattctgaacatttgcaaattcatcaaatgagtaggagcaagtccctttgcaactaatgcagcatttgcaccagttgctgctatacctgtagcaaatacaattgggaaaatgacattactaccattaaccccaattagccaaagcaaattacccagagtcacaatcaaaatgtaaccccataagctgttagctaaaaaggtagctggagttaagcatttcattataaaggtagtaaaatctgcatgagtcattccaactagaattagatctgcaccatagaaaataaagatattaaccagtaatggaatcaacgaattaataaagttagctaccattgggggaatagaatctggtaatttgagcttaaaattacttttttcaattaaacgattaatttcaactgcaagtagtccaataataattgcaacaaataaaccattcgttcccaaattattaatgtcgatcttattatttttatcaacagttgtagtgaccattaagaaagtaactaacgaaatcatcccatcagttgctggatgctctctgcggtatcctttgctcaattcatatgcgataccaaaagcacaaatcatcccaaacatacccattgtcatattatatggaatagtaatttgagcataatgagcgactgcccaatatttccaggcagcaatccatttcatgaagaaattagctgttgctggattatatttatccataacaattggagggttagcaacaattaagaaaaaggaaccaattaccaaaaatggcaatccgaaaagcataccatttgaaatggcctgtaaatgcttttcatttccaagtttttgtccaataggcgttaaaactttatccaatttagtaatcagtgattcttttttagcagtagtttcggccatcagaaatcacctattttctttactaaaacaaaacgctttttaattaaatttgatatggattgaacttgaatgcgttcggaattaccttactgtcatcccagttttcacgaatcttatgatattcgtcccaataatgattattcacctttaattgcggtgtaacttttgaatcaacttcaaggaagtgcatacttcctcttcccatcttcttgccacgtgtagtatgcttgtccaaagcataatccggaatcttagggacatagcctaaagcaaagtttttgattataatgttcttaagcaaatctgatgaacggtctttagttgattcacacagatagcgaatagcgtgaacaaacatcatagcacgatccggttcgttgtaactaaagttttgacgcatctgatttaagctattgataagaattggagcttttggattacccatgccgatatcttctactgaaattgcttgaagacgacgccataatttttcttccatttgtggggatgaaatgtacatctcataagcaaattcacaggcagccctttctttgcctttccgaatcgatttttgtaaggcagagataacttcatccgcagctaatccattacgtgttcttgttcttgcccatggatcagctaaaaattctctatctctgttttgtggcacttcgtttttcttaacatcattttctgacataatgagtccttcctttgacacacgaggagaaatacaatgaatattcaaaccatctgcgagaaatatcaacttaataaagatgaagaaaagatccttctttatatgaacgatcaccgttcagagctgaaaaatctaaggattcgcgaactggctaaaagaacattcacttctcccagctttatcgtcaagacctgtaaaaagatgggactttcaggatattcataattggtctttctaattacagatacaccaaagttccctaataatactgaaaatgacttaaaagtaagatcttgcgtaaagcctttctccaatttgatggataagcataaagactcaatgatcatgatattgggcagtggcttttctcaaaatattgctaactatatgagtgagtatctaaatttatacggttttagatgtactgcaaattcacatcttgaattactccgtaaaaataaagacgctctaataatagtaatcagcaattctggagaaaccaaacgtttagcagaactgtgcattcatgctaaacagaataatagagatattctctctttcgtaggtgaccgtaattcaactattgctaaaaactcatcacttgtaatcagttcagatacgtttactccatcatcctttgatagtcattaccctcagctgttttttggtctaacactcatctattttgaattattaatgagttactttttgtctaagtaggtacctttccttaagacactttcatcataagcgctaggcaattgatttaaaaggttttagggcttattgaaaacatattcttatttttaaaaacaacctgaattgtcaaattaagtgcaacagttaggctatgaagaaatatattgcttgaagagttcctctgctgtgtgatattggaggattcggcgatatttgtggttaatggcatcagttgcctgttgaacataagcttttgacttgtctttcatgctcttgctcttagggaagaattgacgcaaaagaccattgcagttctcattggtgcccctttcccatggagaatatgggtgagcaaagtaaatctggcagcccttgatcttggtcatatccgcaaactcagagccattgtcaaacgtgattgatttaaaccagtcaggatgtctgtcaatctccttttgaagcagcctttggcatgtacttgcccgatagtcaggaatcttgataactacttcaaagcgtgtggttctttcagtcaaagtcattaaagcaggctgattcttgcgtctgatgcctttaaccagatctccttcccagtgcagcggagcttttctgtcttcaacctccttaggacgctgttcaatggaattgccaagatgcttcttgtgcaaagcgtgaccgccatggctgtgatgacgcttgttcctgcgtcttttgagcttcataggcagatcaatattgcttatgtccaccaagccctgatcaatatacgatagacagtaggcgtgctgggacaagggtagcctggcatagtccttttgaattcaccaacgaattcatcaatgctggtggcatcaaatttagctttaaagcgtctggagagcattctcaaaaaaacagcataatgctttaatggatcccgtttatagtagtttctgcgtcgcttatcatgatagatttgtgcaatatcagcgtagtaatgctcatagagtaaataattatgatctctttgcaggacgctaccacgtctgatttcacggctgatagtcgatttgtgacagccaacctttcgagcaattgcggaacaggaggttatgcctgaatcaagcatagcttgaatttgtccacgctgctcacttgttaattgatgataatgtctagagacgctagaatttgaattagtcatgaagatcacctttcttgatttttggtcacttcaagttcaggtcttcatggcctttttgtttaacacttagtgttgcataaatccgggatcataaaaaataaccaacatccattaaaaatgttggtcataaatttactaaatattcttttttattacatcttccgaataaacgtgttcatatcgtatgggcctaccttgtagtcagagcgatccacttcttccagagcatttgtcttaatatagccctttttcttcaagaatgaaagatcaatagtttcactagtcatattggacaaacgcaataccatcgtatccttgatagtataagcaggataaagtgctgaaacttcaataccatctagtaagttaaggtctaagtaggattcctcatctgtgatcttcggcagattatctggaaattcaatgtcccagatcttgttatccaaacgatttacaaacaaattgtacttttgaatttggtaagaaacatttggactaagccatttatcaagacgtgtggcaatattcttttcagacaactcttctccagtaaatggagtaatgccaaactcaaaatcgttattgccaagttcttctgccatcggtgttggcgtcatgacatgtcccactgaagtggtatcacctgaagcacgacctggccgccacaataagtttgacttaccaagttgaccagtcgttgccattaatgttacatagatagaatcatcaactagctcatattctttctcgcctttgccaaagaagtagagaccatttttaccgtcattttggcccacagctcgatcaaaaatataaatattaactggcttttctacaaattcatcattccaattatcatctattggctcattcttagtctttctgaaaccgccttgaatttgagtatgagcatattcagtttgcatccttgacctcattctcaatcttaaacgatgagccagcacagtattgtttatatgcagacgacaggataataccttttcgccattggttagggaaacagtcaatttgaatgggacttctttcttttgcccatcttctttcaaacgatcatccagactgtaaggcaataaccatttaccttccaaaatcagttccttataggttgaggtttctttcttggttagttttccattccaattaagtctaatctcgtggtcctttcttagtggtgaaaagtcatacgtatcgccatcatttgcctgatcatagacagagataacatcataatattcttgattcttatctctcaaagtaaatttgccatcttggtaaacaactgtgagttgatcattggcaattgaattattgtccagctcttgcaaactagttaattcttgatcagcgtcttcaaagtgaattaccttgtaacccaagccattcattctaagcttaattaaaacatacagcttgtagtatccaggctcatctttaaactcaaagccgtttggtgtcaattgcatgatatttggtcgagttggagtatatttttctttaaccaaagtagcttcatatttatctggaaatttgatcttttttgaagctgacatgaacgtaattaatttataaccatcaaaatcataaggatcagtattaaaaactatgacatctttatcagttaagttcaagcgttgagcaattctctttttaatatagttttctaagccatcagcaatttcaaaagcctgcttaaatctgtgatcaatatcaactgcaacgttatcagttacactgcctcctaaagtatcgtgtggttgagaatcaaataattgcttccataatttaatcaataatccattggaaacttgaatactcgactttttagcgatcagcatcagaggctctactcgtcttaagatatcttgttcaagcttaaagttcttgcgcttgtttctggatctaacagaagcaatagttctatgcactcttgaataagttggatatctcaattcaccctggtaagtattgagtttctttgaacgaagccgtttcataaattcagggtacgtactaatttgaacatcatttttgctatattgattaatctttttaaccgtatcagagatgttatgaactatattcatctggtcaattcctgatgggattaaaacctcatcattattaccattcttagcctcaaattcaatgcctttgtccaatcgattcttaacaaaatcctttaaatttttctttgaagccaagtcaatctgacctgtatagtatcctaatggaaagttagcagcaaatacaactgaatttcctaatgcacgccacttgaagtaaacagaccctgcttgtctcttaaaattagtaccacgccaagaaagaaaatcatgaattcctacttgattaagaatcattggtaaattggcattaaagccgaaagtatccggcaaatagcctaacatcattgccctaccataatattttctggcatcattaataccaattaccaaatttctcaataaagattctgcagcaggaatatttgcatcagtctgtgtataccaagggccaataaataattgacctctttcaacaaggtcatgaattctttctttagcttctggatgaatttctacatattcatcaatgattgacatttgtccatctaaagtaaaattggcttctggatgagattctagttcatcaagaacttgagtgaataattgatcacttaatacttgagcatcttgagtggtaaaataccattctctatcccagtgtgtatggttaactaaatatgctttaaccatgttttgcctcctatttttcatacccaacgctttgaattattgttcttaacacgtctttggtttcattaattgttttacatttatcaattaaatttctaaactgttgattttgttgcaaatcaactaaaaaagtaaatagttcttgaatgttcggatagtctttcttattaacggaaatcaaaaagacatacttaatcatgtttttatcatcccattttatcggttcattcaatctagcaaagcttacctttgattgagtggcagcatactttatcggatggggaattgcgatcccgccaccaatggccgtagaatatagatcttctcgtttatatacattgtctctaaagtcgctttcaacataatgatacttttctagatcatctatcattagatcaaggactttttccttagttaacttatctttaagtaaataaatcaatttaccatcaaacaagttcataatgaccttatttttatccgaaactgaaacgaggtattgataaagttcattactatcattctgaaagttagataaatctacctgaattactggtaatttactttcataaattggcaccgttgaaattacaaagtcagtattttttaaatcactatgctgatattcatataatgaataaacacccacaatattcaaatattcactaaattgcgaagataatctagcctttagtaacatagcagtagcagttcctgagccgcataccaatgcagctctctttttatcccaacgattgttgtataacctttccattgaagcaccaacatgaagtgtgatgaaagctaactcatccggggataatttcatgttaagttgatgctctataagtggtgaagctgtcactgtcatttcataagccaatgggaaagttgaaacaattacatttagtaaaggattctttctttgtccattaatatttttaactttcagtagtaattccaagtgcttctctaaattacgaattagttctttgtcttgcatgagattgaaaacatagtcgtccttgattctatccaagaactcaatgacaatgtcatgtatctttttgtttttcacgtcattattactatgctccaacataagttgtggataatttagagctaggtgataaataaaataatgaaattctgcttcactatattccaattcatagctacggaaaacttcctcaaaaaacttagaaaccttatcaaaatattcctctctaatgtaagggatatttcgattaaaattacgaagctgattattagttttgctgcgagctaactccaatgctaagtgaatagtgatatttttatcactataatcagacataggaagccccagagctacgattaaattggtaacttttgtcagtaacttgtttaaatctaaatcagaaaaaatcaccttttctgatttagagaaacctcgaacataattattgcctcttttattatcgatataatcaataatgcaactacgaatatccgattctgaacctttcattcttaaaagatcgccatctttttgaatctttagatgatagtttttggctacctttctagcttctttcaaatacttatcaactgttgaatcactgatatacatagtggaaataatgtcatcaatctcacgcggtttggttagaatcaaaagaagaaaatcttttaatcgttttttatagtcgtcaccaccatctgtaacgataccactttctttaatccgctcgaccaaggacttaaacttttctcgatcattaataagtagatataagccatgtccccgtttattttttattgagacatcgtatatcttaagagaattattcaaattcttaatatcgcttcttaaagttctagttgtgacacctaactttgctgctaatgctttaggggaaatataagtatcattatttttagaaattaaagacgttaaaattgattttaagcgtggttgtgtaatagacatgcaaaagtcacctcatttctataaaatgtagcttatcatattatctaatattcataataaatagatactatcttatcatgtgtaagcttaggcaattttactgtattatttactacctctagctttttaagtggctcttcctttaaatctactaattctactttattaggagccttgttaaatttgagttcatcttccttttctttaaatgaagcattgtacagtcgaataacgtatcctttacgctcttctgctttttttactgtactagtagtaaattcacccttcgtttcaaaaagactatattcttcagggagctttcttttgactacattaaatggaaagattaatcttccatttaagaattccgcatattcaaacacttgcaacccagtcttaaattctttggcgacattagttacgtttgctttttcaaaatcgcaatcagtaatatatactccaaaatcaaaacttaagaccttcttcaattcagcagcgagagttgctacagtagcatcccctgaagctcggccagggcgatacaataaatcagcttttcctaatctgccataagttctgaataaggttaatcgaatagttgaatggtgttttccaatatcttcgtactcacgtacaccgttagggaaaatagcaaacatattgttcttatcagataatgaagtataagtttgcattgtattaatcgaaattggcttttcttgccaatcatttggatgttcttgccaatccaatattgccttcttcaattcaaatggtctcttaatgctgccaaattgaatatcatcaattgacccatcagtcactatttgagtatcaaaatcaatacataaacgatggtctaacggttggcgattatctgtaactaccctaaatccaattactgggttatctttctttaactttatctcaagagataccggcattaagacaaatgcttttctatgtgcacgttcatctaaatcagctggcactctaaaatcaaagtcaatcttaagttcattaagcaaagcagatttattagcttttactttaaatgcttgatcggtagaataaattacccaatcttttttagctggtgaatagttataagaatctccatcatcgccgttgtcttctaagatagcttgtttatcgaaaacgcgcccatctgtttttcgggtgattcttaaacttccatctaaatttacttcaattttgtaatactcattttcaatcgtagtttgattgcttactgacagttcatctgcttttcctacattaggaatcaagtaatattgttgatatcccattggaggaatatttttgactactaggctaatctttgttttataaactttttctggctgataaattctatttcctgggtttaattgaacagttgcaccattaacttcttctgtttcatctttaaaaccggcaactacaaagggaataggttttccatctttatcttgaatctcaaaattctgcgctggagtgtatatggttttagtaactaatccactttttgcaacaggagtggtattgaagaccgttaacgtaattgccttgtcgtcaggcttttttatctgaaccgagatttgccgcaaagttagttcaactaaacttgttgccatatctctagcttgtttatatcgtaaatagatatcttcattaacattatctgaaacactatttgccattgaatcatgtgcagaattttcaaacattttttcccagatatcatcagctgcacctttaggataggaaataccaaattgggtacccaaagttaaaacaggttcaagaatgttagttaggtagtcttgaattaaagtattcattttcttcaaatcagatcttgaagaatagtttgttttatgaactctcatattcttaccgatattgaattcaccttttaacatgttcagcttaggtgctaccttatcaactgcagcaatatattcttctaaagaactaatcttaaatttaaaatctttatttctttcatttaatttttctattacttgaggtagattatttctcgctggtgccatatcagaaccttgaggaaaaagaatttggtctgttgttgcttgtttaactacactagcaaagggctcagatgtcataatcttatctaaattattttcatcaattagaccacctatgaaataaccacaggccattcgataaacattaattcgactgccatcttcacctttccaaataaattctgaatgcgtagcttcataattgggaaaaccacgccataaaacagctttatcaattcccaaccccttatagatttgcggcatactagattcctgcccaaacgaatcaggtacatagccaatattcatgtagcctcccaacttactacatattttcattccatataaaagattacgcactatattttcaccagatggcaaaaactgatctgtctgtgtataccatggaccaataataagttttttatttttaacaagattctgcactttctttaaatcttgtggacgccattttaaataatctgcgatcaaagatgcttgaccatctaaaataaagtgattaaaacctacattgttttccaaattattaattacttaaacttcccacacgcaaaattgcttgtttcattgtgattctgcgtgttttgacaaatataaaaggcacaagtccttttcattgctataattatattgaccaaaacataatttatttgcatgaaaggcttgtgccaatgtctattttaccatctcctgaccaacaaaatgaacaactattttcaaactcaatcatcagcttcatcaagaagtttcaggtgatcaagctgttgagaaaatgtggcttccgcaaggaaaaaggcattagcctgttcagcttgtttctttacgttttaagcaatgtctttcgtgaccgcagcttatatatgcagctgaaaatggatcattttcaagaaaatttttccaagaactcatattaccgttttatgcgcaacgttcacgtcaattggctccacttcaccacacttctgtctgcgcaaatcattaataaccacttgcgatctttgacttcagaaaaacgggctgattgctttgttgtcgatgattcctacttctctaggaccggcttcaagaaaacagaattagtcgccaaagtttttgaccatgtatcaatgacttacaagaaaggttttcgcatgatgaccctgggctggactgatggagcttctttcatgccaatcaattcagtgctgctgtcttctcagaagctacagaatatgattggcgaaaataaagtttttgatcagcgcaccattgctggccaaagacgtatgcttgcccggactaaaggcacagacgtgatggttaatttaatcgaccaagctatgaaagcaggtcatcaagccaagtacgtgctgtttgacagctggttctcaaatccacatcaaatcgtccagctcaagcaaaggaagctggatgtgattgccatggttaaggttagctccaaaatcaaatatgaatttgagggagaacgcaaaaacatcaaacagatttatcgcagctgtaaaaagcgatgcggccgttctcgctacctgctgtcaatcccagtcaaagtcggacgccaggacaaagacggtgctaaaatagatgcacggattgtctgcgttagaaaccgtgccaatcgcaaggattggctggcaatcatttgtaccgacatgtcgcttagcgaagatgaaattatccgcaactacggcaagcgttgggatattgaggtttttttcaaaacttgcaaaagttatctaaaactaagtacggaatatcatggcctgtcttacgatgctttgaccgctcatgttgccatagtttttactcgctacatgcttatgtcagttgccaagcgggacgatgaagatgaacgcacgctaggcgagctgttctattgcatgattgatgagctggcggacattacttttagccattccttgcaattgattactgatgcaatgctggccagcgtaaagcaagtctttcatgccagtgaagcacaaatagctgaattcacggctgactttatcaatcgtttacccaaatacatgcaaaaattgttaaagaaaactagcaaaaataatatagaagcctaaagccaagcaagatcaagagattactggcttatttagtgtgggaagtttaagtaattacatcttttagatcttttaataagtaaatctgtgcgcgagaggtagtaaaaaaccactccctatcccaatgcgtatgtggaactacatgaactgttttaaccataactaaccttcttttctaataaaaaagctatagccaaatttaaactagaggggaaaagtactttgttattgactatagctttttgtttatttttcaaattaactgatttattcggtagtaatgtctaacttaatatcgtcctcgctaatctttttaccgttgtcttcagtgaagttggcaactaatggagcaacaacggcaataaacaaagcacaggctaaaataccacaaacataagcaggaatattatcagcagttaagatacctggaataccacccaatggaggtatgtgtgaacttactcccattagttcaccaacgccagcacctaaagcaccaccgattacatttacaaagattaattgtggggctttcatccagaatggaatagcaccttcagtaataccgaatgtgccgttgatcaaatttgtacgccccatttccaaaagttgtggagagaatctcttcttaggccaaataaaagtcattaaagcataaccaagaggaatagcacaaatggcaatattagtgtaaagacatggtttgtaaacaccttccaggaagaagaagttaccagcagcccaagcagctttattgacaggaccgcctaagtcaacaccaatcatgccacccataataagagccaaaatcaaaccattagtatggtcattaaccattgttttaatccaagccaacaagccagtattaatccacgctaatggacctgcaagaattaacccattgacaatagctacagcaccagttgttaacaatggagttaagatcaattcattggcagaattccacttttcaggaacattaatatgtttacgacaccaacgagcaacgtaaccagcaatgaagccagctaccatagctccaataaaaccttgttgagtattagtagctaattgaccaccaataaaacctgcacccaatgctggtttatcaccaatggcataagcaatataaccaccaattactaagttgaccaagccaatacctatccaaccaacttggttgacttgatacagcatatggaagaagccagtagctttagcaaatttacccagatcatttacaccacaagccatacctatcaattgtgggataccaacgataagggcaccaccaataattgtaggaatcatgtaggaaatacctgtcatgatatagccttgccaatcatgcattagtttcttaaatttcatcattttactcccttcatttcaaagtagttaaacattattctgttaaactaggcacctttgactacagaaacgcatttcttaagaagagcttctggagcttgaatacaagtattaatatcaactctgataactttctttcccttaaaacgatccattccttcgatcttttgatcagagccaattaagacaaaatcagctttctgggcttcttcaggtgtaatttcatgaactcgacccataattccttgctgctcgatcttaacgttgtaacctaatttctttccggctaattctagtgccttagctgccattggcgtgtgagctagcccagctggacaagaagtaataccaacaatatttacatcactcataatttattagctcctatctttttcctaatatactttgcaatttcttgtgaatcgtttaatgttttcaagttttgcttaaaatcatcttccaataaagcagtcgacagattggcgagcatctttaagtgagtattacctgcatttttaggtggtaccattaatgcaaaaacatctgtaactggtttattatcatatgtcttccattcaataggtttctctaagcgaacataaataataccaactctttccacagcttcagatttagcgtgtggaattgcaaatccatcttgcaatcctgttgaatattcttcttctcgctttttgaatgatcccaacagaccttcaggatcattagtaaagccaatttcttcagcatattcagaaattttctttaacaaactttctttatcagcgacgttcacgtttaaaagaacatcttctttttcaaacttcattaaatcacctctcgtattatataaattgtaattagtcatattgtgataattaatcaaattagtatttgctttttgatcttcacatgttagcctctaattgtcattggctttggtcaactggtctaggttatcacctcctgcagttttgtctgctttataagtctgccacccagacagttcctttatgctctaactcacatgctgtattgattgcttctttttgctagtccttgagcaattgggattaggtgcagctttcaaagaagcaaccagtgaatacttatactggcgagattgaacttaagaactgtaattaggggttaacatgtgaagatcaaaatctatgatcagaaatttgaaagaaaggaggccatttccaatgaaattatttgtcggtattgatgttagttctaaagatttacaggtcgttgcacttgattcagaagatcaaaacaaacgcttaattaacgatagctttgtcaatgatctttatggtgctagtgaactgaaaaaacaaattttagatctagctcaaaataaacactatgatcaaatcattattggcatggaagctacatctatttacagttttcatcctgcttactttttccaaaatgacgaagatttacaaaagctcaatgtagagactgatgtaattaaccccaaagaaaccagcaggtttcataaagtctttgaagaaagtaaaactgatcctctcgatgcttattacattgctttgtatctaagctttggacattatcgagtaagcattgccagacaagacaactatcttgctttagagcgtttaacgcgtaccagatatgaattagttcaagaactgactcgtaccaaacagcacttcattgaagctttatattatcgggttaataaactaatcactgtcgataaagataagattaatactcctcttttcggtgctacaatgatgtctattgtaaccgatagtaaaactctggatgagatcgcggatatgcctaccgaagacttaatttcttacttacaggttaaaggcagaggacgcttttccgatccagataccttggctaaagcaattaagaaagctgttagaggttcatatcgcttaggcaaagtaatgactgattcaattgatgcagtgctttctgttcattacaacatgattcaaagctttaatgaatctattaaagatctagaaaaagcaattgatcgtatcgttgatgcattaccagaaagcaaaattctggaatcaattcccggtattggcaaaacctatacagctggtattatcgctgagatcggaagtatcgatcgctttgataaagaagaacagctggctaagtatgccggcctaacctggaatcaatatcaatcgggagatcacagcaacgaacatactccaatggccaggactggaaacagatatctaagatattacttgattgaagctgccaatctagcaagattacatgatcctgttttcaaaaaatattaccaaaagaagtatgatgaagctgtctactcgccgcataaacgtgcttgcacattaactgcaagaaaattagtacgagttatctttaaattgctcaaagatgacaaactgtacaggacaccgaggtcttaatttcaaaaattggtctaaatttaaaagtaaacaaaagtttaacattaaaaaaatcaacctttaccaaggcttagtttcatatactcaaatttatgatcaaaaagaacaaatatcatcgcctttcatttgacttattaccacatgacttgtccgttgggccttctttgtaaccccttacatctaatatgattgcatattctcttctataagtaatgtctcctaatttccacttaaagtggaaattaaatatttataaagttacgtcatgtcctaaatagcttaataacagttcacaaaacatcatatttgcccatgaaaaccacggtcgagtaaaatcactaggatcattaggattaaaactctcatgaatcatattgctaccattggttgtgttagccattaaatacaataaattctgtttttctgctttagtctcttgggttaaccctactaatgccatacctattggccagatatttcctttaggagtatgcggacttccttgaccactccaatattcaccaatatagaaatatggattatctggagacaaaatgaatcttcttgtgttttgataaatgtcatcagtaggtttaacgtaaccaatataaggagcagacattaagctaggaacattactatcatccatcagcacatagttgcctctaccatctacttcataggcatattgctttttaccattgtgctcaacaataccatacctttgaattccttcattaatttcattttgcagtgttttagcctttgcaactatatctgaatcatccaaaatacttgaaaatatttcttgaatataatttaaaactactacggcaaacatgtttgaaggtatccagtatccatatgtacatgcgtcatcactcggtctaaatccagaccaattcattcctgtatatgccacaggcgttcctttacctttattctttaaagtatcagttggaacatcacagtccctttcaaaggtgtagttagaattctcatgatgttgctcagttttaatagttgccagcatctttttaattccagaaacaaaatttgcatcaaattgagctgtttcacctgtgttcttatacagtagatatgccagctgtactggataacagagtgaatctaattcatattttctctcccaaatccagggacccatttttgctttatctgtttgatgaccttgattattggcagtcatattaaatgcattagcataaggatctaagttcatattaaaaaattgccgttttactactcgagtaataatatccttaatgttatcgtcagttttagctaacaataaatatggtcttaattgtgcagatgaatctctttgccacattgccggaatatcaccggttaatacaaagatatttttattttcatcgacctttaaagcattctgcaaagtatctaagaaagtcttgttaaaaattgtatataaacgttcatctttagtgccacattctgcttccacttcattcatataattctttacttgttcatcaataatgtctttcattattttcacccccagccaaattataaaacgcttttataattaaaaagaagacattacttttcaccttattgtggaaaacaaataagccattgcctgtatttttacaaagcaatggcttattcattattaaacggttattcctcacccggtgcagatataactattctcattttaccagtgaaagtgaaattcttcatctcatttggaataattaaattagttccgatcttcaaatcatatgatttgccatcggcttctaattttccttcacctttaataactgaaactaaaagatatggatgatcctttaagccggtcttccatgtaccatcgaggtcaatttgccataagtagaagtgtggtgaaacaggtggttcaactaaagtcttgatttctgcatcttgatccttattagtcttaacatctagcttaggatcaacatgtggcacagttgtaacatcaattgacttttgcgtatgaagttcacgctttttgccgtctttaccaacacgatcataatcgtacaaacggtaagtaacatcacttgattgctgagtctcaataactaaacagcctttagtcaaagcgtggatagtacctgcaggtacgtagaaaaagtcgccagctttaactggaacctttctaagtaatttgtcccattcgcccttatgaatcatttcagccaattcttcacgatttttagcatggtgaccataaataatgtaagcacctggatcagcttgcatgacgtaccaactttcggttttaccagaatcattttctaccttacgggcataatcatcatctgggtgaacttgaactgaaagattatcattagcatctaagaattttactaataacggaaattctttagccttaggattaccaaaaagttcaggatgctttaagtaaacatctcttaaagacatccccttgagtggaccctctgttacaatagaagcatcgtccttgtagccggaaatgatccaagcctcaccgacttttccatctggaatatcataattgaaaatatcttttaatttacgtccgccccaaatttttggtctaaaatacgggatcaaaaataatggttccatttaaaatcacctcatttttactttagctcatttaaaatcatctagaaaggtatggcttttctttcttttgaagaaaaaagatacacttacgaccacatatttcaagagactgtcaagaagtttgtgtaaataatctctctcgttgattgacttttttatttatcttttaatcaaaataggattctagggtgtctcgaacttgcccaaatcctttatgaatcctgttaaagtaacggtcattgtaatccattgcctgaactccaataaaggtgtcaagcgactgctcagttggaaattctgttttaggcttggttttccgcttaagcctgttgttaaaggattcaatcatgttagttgagtaaattgaagctctaatagctggcggatagttgtaaaaggttaacagatcaggctcaacctgtctaagatctctaactacgtttttgtaggctttttcccagttttgatagaattcatgcagcacctgtacagccatttctttgtttgactgagtatgaatctgcttgaattcatccagtgctttttttcgatcgtcaacccgcattttggcactgatattacgcatgacgtgtaccaagcagcgttgaaaatgcgctttaggataggactggcagatagcctctttcatgccaactactccgtcagacaagaagagctctacctgttcaaggccgcgactcttgaagcctttgagcatttcgctccaaatctcaatattttcagtaggcgcaatacagtagtcaatcacttctttatgaccattaggtttgataccgatggcgatataaactgcttcgcgctcataagtgacccgcttaagaggaatataggtggcatcgagataaacgcagaagaacttatctgacagatgtcgctgatgatatgcctcaactttgggaatcatttctttagaaatattggaaaccatagctggagaataatagccgccatacattttctcaatcaaatcagcgatttctcgggttgtgacgcccttggaatagagcttgataacagtttgctctaaaacatcagtatgccttttataatctggcatagtgtgttgatgaaactcaccgtttctgtctctaggaactttgatttctatttgtccgaattgcgtatcaaccttgcggtaataagcaccatttctagaatttccggtattccagccatcgcgctcataaggattgtagcctaaaaaggcagtcaattcggattcaagcaggtcattgacagcctgttggagcttttgtctaaataaatcattaattttatcctgattgaatagagcattagccatatctttggtaaaatcattcatgaaggaatctcttttctagtatgtttttcgttcaaatcaatcatacgggaaaaggattcctttttctaatattcaggaaaataaaattaaggaaatattcatccttacacaaaatattttacggtctctatttcaagttggtttggatctataaaaagatataaattttataatatcagtcggttataaccaattaattatttatgtaattaggatcttatttcgtgaaaccgtaaaatagtttgtgtaaggatgaatgattccttaaatttatttctttaaacattagaaaaaggagttcctttctcgtatgattggtttgaacaaaaaaacacatacagaaagaagaactccttcatgaatgattttaccaaagattttgctcaagctctattcaatccagacaaaataaatgatttattgcgcaaagagctacaacaggctgttaataacttgttagaagctgaattgactacctttctgggctatgatccctatgccagaaatggctggaatactggcaattctagaaatggtgcttatttccgcaaggttgatacccagtttgggccaattgaagtgcaagtgcctcgagaccgcaatggacagtttcatcagcacacgctgcctgactacaagcggcactcggatatcttggaaagcatgattatcaagctatattccaaaggcgtaaccaccagagaaatagccgacttgagtgaaaagatgtatggcagtcattatagtccagcccaagtatcaaatatttccaagcagatgttccccaaggttgaggcttatcacaagcgcaagctaagcgacaagtttttctgtgtctatttggatgcgacataccttcctttgcgccgagaaacgtttgagcgtgaagcagtatatattgccattggcattaaacctaatggacataaagaagtcattgactactgcattgcgcttagtgagaacattgaagtctggacagagatgcttcaaaacatgaggttcagaggcttgatggaaattgagtccgatctgctggtcttctataattatcccaaacaaatcagagcttcaatttattcaaccagcatgattaaatcctttaacaacgtcatcaagcgtaaagctaagcctaaagcagagtttccaactgaacagtcgcttgatgcatttattggtatccaggcaatgagctacaatgaccgctatttcaaccgaattcataaaggctttggtcaggttcaggataccttagaatcctattttgattaaataaataattaaaaaatcaatttgcgagaaagaactatttacacaaaagatttgacagtttcataaattatctatcactagttactacttataagactaacatcttacttaatcaaactttaaacaaaaaaataagaggtgaactacaacatcgtcacgttatagttcatctcctactttaagttgtttgacaaagagtcacattagctagtctctgtctcttactacatacattaatagttaagaagtggaaattaattaccaaagcacctctatttcaatgaacctgggaatctaaattcatatgaactaatcgggcctactatatcaagactagttatttgtttgactaattcttgaaataaaattattgcgttattaacaccataattgtttactattttttggattttttctggacttttaactttttttggattctcaatatcataaaaataatccactttaatatttaaagtcctatattcagaatcattatcattttcttcatttgagcaattggcatgccccgataatgtcacaattgcatcgtttgcagaaatagccacagaaatatcatcaaacataaattccaaatagaaactgtcttgttgctgttctagttcacctttgtattcataattaagtttattaattataaatccattatatttaagctgtactgacatcgttatctcctatttctttaccatttgtggttgaaaaactgatttttttattcccacctgatagaaagacagtgtcttttgtttattagagctttcgtttatcttcatctttgctattactttagaagttttatgctgtaatgttttattatctatttcttttatttttattcgttttcttgaaaaactagataacttatttaaaacttgctgatatttttcttcactactttctaaatcaattccctgctcaacttctgtatacgtgcttaaactcaaacccgttaattttgctgcttcatctctatttaaattcaaactaattctttttccgaaaatcttttgtgataactggaattgatatgaatttaatctactattatttggattgattttattgaacttcatgtctttcgtttctccttcctataaaattcttttccctattattcaccaattgattatgaattagttcagccagtttcccaagttgatcagtaagtaaattcatttttcttatttttctttgatctttagtaggaaatttagtaaatccatatgtccagacaaaatatactttactctcatttaatgtaaataaaattctacagtttttccttacgccttcatttgtttcagaaagaaagcgaatctcatatacatgattttgtgacatcaattttttaacaatctcgtacttgatatatctgttagaatttggaactttatactcatccttaaaagaatatccaataataatcccttcttttacttcgggctttaattgttcaatattaccactactatctaaagtaacatttgaaagaaagttgataattcttaacaccgattcttgaatattaggattaagattatattcatcttctaaatattcttcggctaatttttgctcagacaagttatcatttatcaaatagaactggcgcatgggtcactctcctttgtctaaacattttacgtcaaaatcatgatattttccattctttgttgaactacagtaagtgttaatgtttttgcgatagactatcagccatagtctaaccttattctttagcttcatcaattatatcagcatccccaacctcagcacaaaagaaaaccgactccataatattccctgtcaatagctttttattccatcaaaaaaggaggacatagttctctttgataaaaaatctattccactaaatattttataaataaaggtgatttctatgtcctctcttaatcattgtattaaatcgagcttgacattaaagatgaaaatatcgtttttaaagcttgtttgaattaacaaacaataatgtcttaaaagataccacgccaaaataaaagcgaccttcgttcataagagcaaagaccgcaaacttgttaattgtctcaccacagaaattaacactcaaattctaaccttacattgcactaaaaatcaatacaactctacgccttctcaagcaaactatggtcaatcggttcgccctttaagtgggcgccacgaatgttcttggcaatcattgacttgcgtttactctttttatcgtaaacccagtcgccttgggctgtagtgatattctcaactttggtagtatcgccatcgattctcactaagaatgctggtgccattgttgagcgcttgttagggcctgaagcaaaaccacggtttgtcatgtatgaagttactaatacttctttcttgttgcctttaacgggaacagcatagtatgaataagttgaagttctccagttaaatggaacactagctaccaagaccgctgcgtcgccattaagtggtttataaccataagttaagtggtctgaaacccagccgagcatggcaacattgtcaccgactttggcatctgcttgctgccacaaatcatcaccagtaccacggttcaaacgcgttgtagcaaataaatagtacttgccgttcattggaatgatatttggacgttcaatttcgtcggataccatcaagctgttaactaatggtggtaaaacttcagcaaccttaggattgttctcattcttggtaaggcgaatgataccaatagtagcgttagcccatgttgcacgactcttcatgtcgtcattagcagtcaccttcaagaagttttgtaaaacttgcttaggcgtaccaccatagttcttccagttatagacttgattttctccttggtaattattgctacctgttgaagcttcaaaaattaggtaacgttgaccgccaacagaaatcacatgcgcatcacgcatagcaatattatctgcacctttattggtagacttccattgcttgtatgtctggtagtgatatccgtcgccttggaataaaacatgacggtgacttctcttagctatcgaaattgtgtttttcttcttgttaaccttcagcttcaagttaactgttgcaatcttttggtgattagtattttcacgggtgtctacatcagcgtagaacaattgaatactgccatctttgtttaccgtagctgagcctgaccattcttgatcagttggcttagcattaaaaccaaagattggaccagcacatttccaatggttaagattattgtcattgtacttgttatagagcaaataaatgtgggcatcattttggttagggattcccatcatggcgatcattaattgatagcctttatagttaacaactctaccagtcttagcatcttgtactggccatgaatcccaaatttctagttccgctacttgaccagtttgtgcatcacgcgtaacggttgccggcatgtttttaatctttttagcattaaaatatggtacgcgatattgcgcatcttgatcaatcatctttttagccacgccagcatattgatcatagctccagtgagtactagtatccttatcaagctcattaaagttcaactttcttacttccttaagttggacttcagttaaatccttaggattaacatctgcagttcgcaatacctgaatagtttgaggatctaacttgtaaactactgcgtcgttattttggctatagctagtattactaaaaccattagaaacattatcactaatagattgagtagtatcaccagctacttggttttgagcgttctgatcagtattagtagtatctgcaacaccagcactgtttcgattatttgtattgtcagtgatgtttgccccagtattatttcgcattgtttgattttgagcatgatcagcagctacatcattattttggttagtttgtgcttgattttgatctgatttatcttgttgatcatttgtggtcgtagtttgggtatttctttgttcagttgtaggttgttctactgtatcagctttaactgttagactgttatttatgttaaacaagccaagtaaaacagctgccgatgcaaaggtaactaatgtgcttctcttgttcatctctgttcaattttccttctgttatctcatagccagtttattataatatcttgttcggatttttggaaccttcttaatcaaattgaaatattagccaaataatttctctccatgaaaaaagccttcgctgatggataaaaccgtcatcacgaaggtacgatcattagttattatacaagattattaaaaagtgtagtattttaggacatacttgagaactatttgtgatccgtgttccagcacatctcctgtttatcgccatattaaattagaaactataatagtcttttgtatcaattttttccaagaatatgaaaagatcaaaaacctatgttcaacaaacagctgatgccattagccacttttcctttaaacgctgtctctataatattttcaagaatttttatatatcttgaaacaatttcttgtgctatccaatcccatctcactaaatattcttcaaaatcatcctcaaagtatttctcagaattgacggaatatccactaagtaagttatttttccacttagacttaacgttaggcttctcaattaaccaccatgtaatcactatatagataacggtttctacatcacaccataataaagatgcttcttcctctttcgagcatatgaataacgctaaaaaaacgagatcccatgttgaaagtgtctttttccaaaatcttccagagacaggtagccaatcttcgccatattctacttcatttatctcattattaatatatgaacaaaataaagtctctaaattatttgcagttgcatctcctataattctttcaattaaattttgtttcatttgatccaaagattgctttttcttaatatcttcaattttaaaaatatcgttaaaaaagtccttatattgtgatttcaatccacactgcaagtcaaatccatttcctattacaattaatcggtttatttcatttaaatttatttgcacttctattctttcctcctacaaatagagcatatcctaataattatacttttccttattgtcaatctctttttatcataaagctgtaatgaatttttacataaaaaagcctttgcgatagaacgtatccattaagtgaagggattgatctctctatgtttagaataaagtaatacgcgtggtgctagttaaatcgttctagacaataagccaaattataagctaaaattgcaatttccaaccggctttgaaagcctatcagactacgtgctcgattgttctcggcattgtaataggtcagaagcgaaaagtcgctttcaattgttctgcgaatagccatcaattgatgatcattgtgctttttagctcctgtcatatttttacgatatggtgtccaaagttcgtaacccatttgttttagctgttgatgcagttctttgcctaaatagccttcgtcgccaagaagatagtaattagatggatgggtattttctatcagttcaactgtctccctggcatcatgaactgatgcctttgttacgacataatcaagaatgtaaccgtcatcgctaacaatggcatgaactttgaaaccatagaagtaaattttcttggtggccttataaccaatgttggcataaccgcgaaaaattttagcacgatagtttcgaattggttggcaaacaggtaccggaaagctgtcaatgatcaagaactgtccattcaggtcaacctttttattcatttcttgccgtatctgataaatcaattgcaatagctgacgtgaacgccgattaaaacgtgagtgtgataaacaattgaaacattcacagaatcttctttgtgattcaattcctgtcttagcttgccagataagtaaagccaaaatcagactgtccgtagttttaatttgatcaatatttcgccgatgagtaaactcagccggtgcatacaaacgataccagtgccgacaaattatcactaaatctttaaaactaacttgtaaatggtggctaaaacgcttaagcttaaggcagttcaatcagatcagactcttttctattattatacaagtcgagtctaacaagattggacttttttattaactaaaacgatttaactagcaccacgcgtatttgaatacactctcttattaatcttatcacgtttaacgcaacttagaagcaaacttgcatatttgcaccaagcattaaaataaccagaactttttcttctgctttaatgggtgccaatccatctgaactgggtcgccattgatgatacttctagcattatcttgccactgctgagctagatcttgactgaattcttgactcatctttttataagcttcactcaattgatactgccgtcttggcaagtcgtgtgcgtcgctggcaaaggtacatccctgccccgccgcaatcaacttgcgcgacatttcttcaatcttattgccaaaaatccccgtataagaactagcagtaatttgcactagacacccttgttccagcatcccttgcaaaacttctggttccttcaagatgcggctattacgctctgggtgcacaataatcggcgtaatcccgcgctgcatcaccttgaatatcgtgtcctgcgcataagttggcacgtcatcacttggaaattccaatagcatataagttccatcttcatcgcagaacaagatgtcatcattatcaagcgcatcaattaagtcacccgacaagcgaacttcctgccctgggaaaaccgtcaacggcaccttggcctcatctagcttctgttggtagagatcagtcagccagatgatgtcatccttatgattagtgtaacgaccgtttagcgtatgtggcgtacagattgcatgcgtcacgccgtctttgacagctgcgttagctaatctaattgatgttgaccaatcctttgagccatcatcaatgccaggcaagatgtggcagtgaatatcgactaaaaccattattgatcgtcactcttttttctaccgaacaagccctttttcttctcagcgccatatccataaccatagccatacccgtagccgtaaccatagccaccgttttcagctctaatgtcgttcatgacgtagcctagaatccgagccttggcaaattttaacatttgcactgctctagtaatcccagccttttgcgtaacgccttgacgtactactaagactacgccgtcaaggtgactagccaactcttgcgtatcggatacttcaagaacaggagctaagtcaatgataaccatatcataatgtgacttaaccaattcaatgaaggtttccattctgcgtgaaccaatcaattcagctgggtttggtggaatcggaccagaagtcaagattgacaagttatcaattccactttcttcaaccacatcatttaaattgatttcgtcagcttctgaagtaagaacagttgtcaaaccagtattgttcttaacgttgaacgtactgtgcaaagttggacgacgcaagtcggcatcgattagcaaggtcttgcgacctgcttgtgcataggtgatcgctacgttggccgtaacggttgacttaccttcactgatattagctgaagtaaaagctaaggtactaatttcttcatcaactgccataaagttaatgttagtccggatagttctgaattgttcagataccgcactacgaggatcagcaactgtgattaatttggcaccatgcttaattgtatcgtcggtaccacgcttttttctaaataatgccatttacttctcctctcctatactcgacgacttctacgcttagggccattagaattcttattcttttttctaatgacaaatgatgatgacacatggaagtgtgaaacttgacctaagttaactaaacctaagttatcagtcaagaatgcatcatccttaactgtagtgtcggacatttcacgaattaagactactgcgaaacttaaaaccaagccaataacaaagccagccaaggtaaagagtttcacattaggtgatgattgattaccatcagttgctggcgcaacgatcgtaacgttgttaatgttcatgatgttaggaatttgatctctgaatgaacgcgctacagcgttagcttcaacctttgccttttcaagtgtatctgcagtagcagaaattgagaagacctgtgattgttgttgagtattaactgaaacgctcttggctaattcgctagtagaaacgctgtaactcttaccgctacgttcaactacttctggttgagcctttcttactaatactcggcgaccctctgcattagtcttgtacttagcaggtttagcctttttaaccactctaactgggttagctaaacgattagaagcatcttgcaaaataacgtgactagtcacgatatccttataggtagtaaccatttgcatgttagcttgttgcgtattgtatgccgcattcgggtcattcttattagccttttggttaaccaagatctgtgcattagaagtatactttggtgaaataataaaattagcgacgccccagccgactaaagccaaaccaacactccagataatcaatgcccagatgtggcgacggcaaatttgtagcaattgagtaagatcaattgtattttcagtttgcttttgctcttgttccatttaccttttcctttaataacgattaacgattcataatatagctggccttattagcagctaccttaacatgtggcaattctagcgctgttctgatcttatcagaaactcgttgacgctcatctttacttaccacttcaatttccattgtgccaaacttaggattctgagtttccttacttacaccctgagcatgatcttgagaaagattgttagtggcttttctataatccatagcaatcttgtacatttgattcatggtcaagtcagtttgcatctcactagaaatggaattcaagaaacttgaattaagcaaagttgaaggtgaaacagacttcttaagcaaggccatgattaccaaacggtcacgctcttgtctaccataatcctgacgagggtcaccatgacgaagttgggcaaatgctaaagcctttttaccattcatgtgataagtctggcctttgacaaagctataacccatattgttgaaagttaatggagaagttacatcaatccccccaacttggtcaattgccttcttcaaaccacccatattgatcatgatgtagccgtcaattggaacactgtaatatttatcaagtgtcttaatagtttcactaactccacccaatgtataagctgagttgatcttggttacaccatattgtgggtaatctgggaagattgcatttgagtcacgtggaattgaaacaatgcttgtactattagtcttagggttgattgacatcatcatgatggtatcagttctacccttccagtgacgacccatggcaccagtatctgtacccaataacaggatattaattggctttttctcattcagtaaattatcaagagtacgtcctttattactcttggtagtcttagcaacgggagtgtacatgttttgcgtcgtatcacgcaaattcttatagatcatcccgcaaacaaaaagaccgactacaatgatcacgccaataacaatccaaaaaccgcgccagaacttacggtgacgacggtggtgatgatggcgatgacgatgtatcggtttattacttgattctgcgttattttccaatttaatcctcttaatcttataatcgttactattatatactcaagaacccattttgaccacccttacatgcggcaaatacttgaggtgatgtgcgttttattgctactgaaataatatattatcggtagatacgtaacatgcaaataaaaaatgcatccctcgaaaaatggaatgcattgctgctagattgagtttaaacggaattatttttcatcttactatcgccttgccttaaattgtactcacactgtaccatatttagtaagacctaaataaccaaaaagtattaagaagtacattaaatagaagttgaatagcatgttaagtattgaagaatcaatcaaagaatttgaaacatattttcagggtaaaccaaatgaagttgaagtagtatcacgaactataaaacaaaaaagtagacggccacataaaccgcctactttatcctaattgttatgatgatcacttgagttagttaaatcatcatttttagttagatcatctatatttccaactactccaccaaatagtgtaaacacacctattccaccaaaaatactaccagccaccgaatgcctttgcatcaccaaaaaagcagaaatacaaatacatagaattgttactattgatactactatcagagatgtccatgcgagccaacctcttcttttttgacgagcaacttctaatctccgtctatgcctactttcttcaacaccattattaaattatttccttagcagcattcggatacaatttttggtatccctcaagaatatcaggaagcggaattggtccactatacatctcaagataagccattatttcttttttggtttctttaggcatctcagatttttgaatttgatcaagaatctgttcatctagcgaatctttatctgactttttctttatatcattttctagctttttacttggcttttgatctgccataagatattattccctttcttaagtcgtcccctatcctttgccaatcactggcaatagctttttcctcagcattactattactagaatatatcaacttgtttaataatttgacataaggcatagctacatttttcgataattttttaaacactaattgaatatcggtaaacataattctcacctcattcataatctctttctttattaaaagtatacttaaaatttgactcgtggtaaagattattcttctacatgcaatccacttctttccttattataagcatctgtaatacaataaacttaacagcaaataacgaggtgtttttatgattgataatcaacctaaaaagacaaaagcttatatcgcgggcgtaaacttaaacgaccaaaacttcgactactacatgaccgagctggccaacttgactgaagccaacaacatggaagtagttgggcaaagctttcaaaatgcagaatcaattgtcgccggaacttacttcggtgtcggcaaaatcaatgaaattagaactatggctcaaggcttaaaagcaaaagttttagtccttaatgacgaattgactcccgtacaaattcgcaacttaggaaaattaaccaaaatgcgagttattgaccgcacggaattaattctggaaatttttgccagccgcgctcgaactaaacaagctaaattacaagtgcaactggcacgtttacaatatgaattgccgcgtctacatccctccgagaacaacttggaccagcagcgtggtggtggcttagctaaccgtggtgccggtgaaagtaaactagaattgaaccggcggacaattggcaagcaaatttcggctatcaagaaggaattgaaggctgttgccggccaggaagaaatcaaagcggcacgacgcaaccaaagtcgcatccctaaagtcgctctcgttggctacaccaatgccggtaaatcaaccacaatgaacggactattgcgtgaattttctaaagaaggagcctacaaggaagtcttcgttaaaaacatgctttttgctacgctagatacttccgtgcggcggatcaacttgaaagacaactttagcttcattctgtctgacactgtcggtttcatttctaaactgccccacaacttggttgaatccttcaaggctaccctgcaagaaacgcgtgatgctgatttattaatcaacgttgttgacgcctctgacccgaacatggtccaaatgattcggacaacacagaacgttttggatgaaattggcgttaaggaaattccgatgattaccgcctacaacaaggctgataagactgatcgcaattacccacagatcgaaggcgacgacattctttattccgccatcgatccaaaatcgatcaaactactggccaacttgatcaccaagcgcgtttttgccaactataaaaagtttgacttgatcctgccactaagcgcaggcaaggaactggcttacctgcatgatcgcgcccaagttttacgtgaagactaccaagacgatggcgtccacatcgaagcgaacatcgcgcccgacgaccaaggacgctttcgtcaatatttggcctaactcgattaggaaaaaatatgaaaaaacataatctgctgttcctttttgccctcacatttttgttagttcctactaacacgcctgtaatggctgctaaatatagtgctagtgagtcaaaaaaggtgcgcacttttcaaaaaagctatcatcgtttgagccagaagaattacaatcagactacgctctttaccgtgcagccaaattttggtattcctttttcagcaggagtgcttgaccctgattacatcaaaacttcaatggcttatgtcaattattaccgctcattggttggactgcctgatgacgccaattatgctaatgataacgttaacgcacaacttggtgctgcagcgctagcttcagttaacgcggagcaaaatctgcgagcccatggtttacaaggttacgtcaagcctggctatatcagtgatactgactgggatacagcggaaaatactacattgggcaatatcaatttttcagaatcaactagcggaaccacggctggcgagatcgttaccgatctgatacgtgaagataataatattgcaggtaatggcaacatcggtcaccgcggcatgatcctctcgacgcgagccacccgaatgggaatcggcgcagcttatggcaccgaaaacaacgtcttgtattctgttgaacatggactatttgccgatgatattttgcgccagcctgtaaaaagccgaatcgtttatccagctgccggcgtttttccttacgaattagttggtggtaaaacgccatggtcttactcaacaaccgagcgaatttctggtcagccgaaaatttacatcacggatttgaccaccaagaaaaagcggcaagcgacgcaggtgcgcaacttcggcactgctctttatggtgacggctacacaacgacaatcacttaccgacctggcaaaaccaagttgatcagcacgcacaagtaccgtgtgcaaatcggcaaacattatagctacagtttcaaatttttcaggcaaaatagcacattgaaaaataaacagattgtaaagcatcgaaaatgaaatacgttgatatgcaaaacggctcaagcagttgtacatcctgcttgagccgttttagatagtaacaaatattgtagtctgttcaacaatcttcatgtaaaataatactcaggtctattgcagcggttagctaccgctaagacttagtaattttagcatggctacacacccctcaagattttttaagttacggaggtggaagcatgcataattgggtagactggagaagtaggcttacaaatgattgcttgggctattgcgtatgcgataacaaaaaaagctaatcacaaggattagccgaaacaacagtcatcttaagttacgattggagttagcgaccgacactcgctagctccttttcttttattattttaatatgatttagaatttattgcaatgtttagaagtgcttattctacgccaatgacgtaacgcatgatgaatcaatagcttgttgtaccaagcataattgtgcttcatataattataggcggtggcaaagttatccaattgtcccgccgcgataaattgattgcgtgtccaatgccaatcctgagtaggataatacaaaattttcactcggattacccttcctactgtaataattgcccgatcatgatgataacgcgtgcgagcaacattgaggtagctaccaattaaagtattgcgccagtatcgattatgcagataatttttctcccaaagtaaggccttgcgcaataccttagaaatgcagtaccattcgcgtttgccgttaggcaattcaaccaaacaccaaagatattggtgtctcttcgccattcaatccaccccttctaattaatatcggctttaattataccgctactagctattcagttagaaaatcaataatgtcagaaaatattaggtcatgatgtcaaatctattcaactgacatcatttgtcctaagaacgcatttaccgcttgcttaatatactcgctgcaaaggtgagtatactgcgttgaatttctggacatggctctgcttaaacggtcttgatgggtgtcattttaatccttctttaatttttactataattttctccacactgaaaactatggcaaaaaaagtagaatttttcagtctagggaaaacttttatcaatacaaaaaagcaagcgcattaatcgcctgcctaaaagtattccaaattacttctctatagtactctcttagcaattgatggtgtaaagtaactcgataccgtttgcaaaatagtaccttgctctggtgttgctgcatttacatattgattgtttcctacataaattgcaacgtggtatggagctgtcgttgaaccccagaagactaagtcacctggctgcaagttgttcaatgaaacagtttgaccaaccttaacttgatcataagttgttcttggtaagttcacgccagccgctttttggtaaacatattgtactaagccagaacagtcaaatgaatccggaccttctgcaccccagacatagttcttacctatctgttgtttagctagcgcaacaattgaagcggccttactagtagcttgcgttgaagaagtttggttagtattttggctagtcttcttgattgccgtattaacaatttgcttagccttcttcaccttagctatcttttcagccttcttctgagtagccgttttagtagctactgccgctgtcttcttattaacagtagtctttgtctgcttagcttccgttttcttaacagttggtgcttgcgatacttctgctttttctccagcagtaacatctacggtataacgcgcttcaatccattcacgcgttccaaccttgtaccacaagttgcccttcttatcgagtgcagtctcagctacattccagaccgtgccgtccttagcacggtagcccatgaattgaccattctcatagttggtccaaatattcaggctcttacctggtaaatagctaatcttaacttgcttaatcgcagtaaaattagctgcacgaacagttttcattgatgtgattgcggaaacacccgtaacggtcagggctgcagccgctcccactttaaaaaaattatgtttcataattgaatccccttggtagcgaaacaggtgaaaacttttcacctaaaattacccactcttactatgtaacgccttcattattgcatgtcctacctcaagaagcaaattagaacattacaatattacaaaaaagacggatcactggaatccgtcttcattacttactatcttaatttaaaacacgcttagcaacacttgggtagaagtatgaactcaaagtttgcttgattacgccttgacctggtgtagcagcgtggatgtattggttgttaccaacatagatacctacgtgatatggagcacttgcactaccccagaaaagcaaatcacccggttgaagattatccatagaaacggttgatccttgcttaacttgatcataagtagttctacccaacttcacgccagcagcgttagagtaaacatattgtaccaaacctgaacagtcaaaaccgttagttcctgtaccaccccaaacataggacttgcctaattgtgctgaagccaaagtaataactgctgaagcatcaccagttgcttgaactgacttcttagcctttttagctttcttaactgcttgagccttatctgaactagcatcaacagtatattgagctaaaatccattggttatcaccaatttggtaccatgtacggcccttcttatcagtcttggtgtcaaaaacattccaagtagtaccatgttgagcacgttgaccagtaaagtggccaccattgtagttgtcccatatgttaattccataacctgcaatgtagttaatctttactttggtagtagcagcttgaacagtagcattagttgaatctggcttgatgacatttactgcagctacaccggtcagagttaatgcagcagctgcggtaacttttacgaaattgctcttaatattcatcaaattctcctgtatgttttcactatatctataagcattcttagaatttattacttaagctggtaacgaaaatattaattcatcgaaaaatctttaaatttctttaatgtatttaacaaaatctataataatgccccaatgttacagtagtgttacaaaagtaatactgatttaataaatattacgtttccgtcaaaaagaaaaatagctagggagatttccctaactatcttaactagatatcttatttttaggaagactaacgcaattagtcgattacacgcttagctgatgatgggtaaaatgaagctaaggtttgttgcttaacattttgaccaggagctggagcgtgaacaaacttaccgttacctacgtagatacctacatggtagttaccccagaataataagtcacccttcttaagcttcttagttgaaactgaaatggtcttaccaagagtaatttgaccgtaagtagttcttggcaaaattttgttaattgcattcttgtaaacgtagctagttaaacctgagcagtcaaaaccgctaggacctgcagcaccgtaaatgtaaggcttgccgatttgcttcttaacaagcttaacaaccgcattacgctccttagtagtagctgattccttcttaactgaacttgaatcaggattggtagtttcaagatctgaaattgagttgttagtattgatagtagtgcttgaaacatcatcagcgtgaacagctggaacattgatcattgaaataccggcaaagaatactgataaagctgcggtgtattttactaaagtacgtctaaaattcaaaattaattgtctcctctaaaaattactaaatttgtttttgatttcttaaatcagttgacggtttatataataccgactgaatgttacacgaatgtttcaaaagagctaccatcgcgttaagaaacatgttaaaaaaacagattttatgtaaaaaaaggagaagcaaaatgctagcgaagctttgctacaagggcatcgagcgcgtttttagtttctgttaaattgtcgttaactaagatatgagcgtattgcttcaaatcttcaggtaaagcatttaattcactgccgctaagtctttctttaatcttggatggatcatcgccccgctttaaaaggcgctgttttaactcttctttagtagaagttgtaacataaagaaaataagccttgtcacctagctgtttaatgtaggaataaatgcccttgatatcgacaattaatgaaaccagatcactttttttccaggccagattcaaagcttctcgacttgagccatattgataagagccgtacttaatatgctcaaaaaagtgcagctgggcaaaagtttcatcggtttcaaaatgataagaaacattctgctcctcgcctgatcgcatcggccgcgtggtatgcgttaatacgcgtggaataccatatttttcagttaaatattctgaaacagtcgtcttgccagcaccactaggtcctgcaataagaattatttttttcaaaacctgattctccccacttgaaaatgttgcttttttataatagcattcttgtgttataaaagactaagactttttctcggaaggaagatacacataatgaaaaaagcagacgtaaaagttggtgcaatcgttggtgccaagtcagaagaagaacttaagaagccattccaaggcaaagttgaaaagatctacgaaaattccgcattgcttgcaattacttcatacgatcccgttgacaccactgctatcagcgacttgaacaataagatcgtagttaacttcaagaatttaaagactgctcgcgctgccaagaacagcaagactgcttcaactaatgaagttaagattgaaaaaattgacaagaagaacgacgataaaaaagaagcagacaagaagtaaaatttgacaaaaatagcccgcgcaatgtttacgcgagctatttttttgcctaaaattaggacatcgatacgagaggaaatattttatgaaagaaaaaacgcgaactgttttattttggtttattttaatccagccctttttagacctttattggttctacaacggtaaattagcggaagttttaccatttactctacctacgattatccgaattttagctgtttttgtgattttctgtatgtttttcagtcaaaagcaaaattggcaaaaattagggcaagacaagtggttaattctatatttagccctactaattttgtattcgattattcacttaatccacgtcaaaaactttaacagcattaatcctaatgactacaattattcaaccgtaagcgaaattttttatctcattagaatgcttttacctctgatggtgatcttttttacaaaagaattgaatttcagtcaggagcaattcagacacgttatcgaaggcatcagcggacttttttcatttacaattgtcattaccaatctttttgtcatttcgcttagaagctacgagacaggcccgattagcgctaatatttttgaatggtttgttaaccccaatatcggttactcccatatggcctccaaaggcttcttcaattttgccaacatggtatcagccgtactctttatgctggtgcctctgatgctttacttcatgttcagtcgttttaactggaaaatcgtcactttgaacgtagttcaagctttagcgatgatcgagttaggaaccaaagtggccctcatcggtttaatcggtggcgtgattatcagtattttgctgtatgttttccacttatttattgttaaggatgttaacaaaaacggcaaagccattatcgtggcgcttttaatcgaagcgggcacctttgccatcatcccctttggtccagcaatccagcgctataattatgaaaaatatttggctcagcaatccgatgattctttgacacaggccaagcgagaattaaatgctggcttaaaaaaatatcctcaaggtaaacagcgcaaggaatttttaacgaatttcatcggcaatcattatcaagattacgccttaaataagaagtttgtttttaaaagctacccttataaatacgatcctgaattttggctcaaaatcatgaacgagccaggcaccgctagaatgcaaaatcgacatgtagaaaaagcgatgcttgatcaagttgtgaagactaacaataatcgactcgacaagttcctgggcatttcttacacacgagaaaccaacattttcaaccttgaacgtgatttcactagtcaaatttattcacttggttggatcggcatgctgttgttcattgggccttatgtcattatcctgctctacgctttaattaagtggctaatgaacaaagaaaagcggacttatttgatcagctcaatgttgctttcaatcgcctttatgattttcgcagcattctcgtcaggtaacgtaatggacttcttaacagctagcttcatcctggctttcgttgaaggcagcttgttagctagcgtaaccagaaaagaaaattaaacataaaaaaagttaggtagttgcttgcctaactttttcttagtttttaaacattatttttcttgcttaataaagcttgaatctggcacccgaattaagtagtaccgagttgctaaatgacctgcatgcatcccgattccattttgccaattccgcttgtacttagccgtataaattgccacgtaagcacgttgatactttttatccattttagccaattccttttttacataaggaatcttctccgcattcacgtcaagcgcagtgttaccataagcaatcgaagcatagtcactaccaatcgtgaccttgctgccatcgcgataaaaagtataagtttgtgagccatatctcttcttagcagaattaatcgttacatagcttgaatttcccgcacctgtacgcattatcagtggctcatacttcacgcttgaagtaatgcggtttgcatcttccaggtctggattgtccataaaagtctgattaaacatccaacctgcagctaataaaagtactacaatttccacaatattaagagccatattcggccaactaaagcgtttatgctgtttgataatcatcttaatccgtctttgacggatgttctggacgatgaaaactaaataaagaatgatggcaacccaaatcaggatcccaatgatattccagctgaacatatctcgccctgctatataaaacatagaaacatgcagaagttttcatatttctacatgtcagaaagaaatatattttcctttctttgtcttatttactgctgtcttcatcagtattccgatattccatctggggagtaatcgcattgactaactcttgcagcttaagggcttagccagcccattgtttttattttgttaacgctagtaaatttaatactgcattgtcatcacgatcattgctatagccacattcataacaaatgtattcattatgcttggtgccatgttttttattgccctgcagagtaattttgtctgcaccagttttgacatagccacaattggcacatctttgtgttgatggatatgttttatcagctagaattaattctttgccataccattcacacttgtaagtcaagacttgtctaaacttgccaaatagtgacctttgcatgcctttggaggctacatgggtcatcatcatttgtttgacattcaagtcttcaatgacgatttggtcataattgtttacatgctcagtggtaaatttttgcaaaagatcattctgaatattggctgctttgcgataatcacgctgaagcttggttctcacttgcaggtaattattgctttggcttgccgatttaccgttaactcttctctttttagacaatactctttgataatgcttgattcgcttgtacagtttctgtagttttgctggcaaaacattaatcttgccttcagtgtagttgaaatgcccaacgttgacatcgatggcggtctttttgccagttttagcctttagtccagcctcttcttcataggaaagggcagcgtaataatgtcctctttctctaaagatgctggcaattttaacctcttccatctttaatgcctcgtatgctggaatatcaaaccaagatttaatccctctaggcttatctaatctaagcttgccattaattatcttggcgcgatcagttttaaagccttgacgtggagctttcttagatttgaaatgcggcttgccccaatcaggctgggtcttgtcaaagaagttcttccaagcattagccagatccttgactgctaattgcagacagcgagcagacaaagcaaattgccaatcagccttgttattgactaattcatcccacactcgatgctcattaggactaggattattatccttgtctaaagtccaagcttcatacatgtcttgccaggttgctaaagctagattccagcagtatctgcgatagttacaaagacgttcaagttctctttgcattatcttatttggccttaattcgactacctgagttttgatcatttgtttcacctccaatgcaaacataagtttagcaaaggatgtaacaaaaacaagcgaacaaaatattaaatttttagcagcagttaatttgcttctatgttttgcctttctgaacaaattacctgtatctttttctatattgccattaaattctatatttcagctaaccatttaatcctcctttttttcaattatatggtaaaaaaagcaaaatttgaataggataataattgaatacttagttaaatagtgagaagatcttactagtacattagatttattagggaacattatggtagcaatagctttttattcaattactgggcaaacggaacgttttattaagaaaactcaactttcggcccatcaaatcgacgatgccaaccctaagtatgatatgggaaaatcttatatcttaatcgtaccctcatatcaggacttcatgatggattcagtcgttgattttttaacgtataaagataacaaaaaaatattatagggattatcggttgtggcaaccgaaactttaacgacctctttgctcaaactgccaaaaagatcacggcaacattgaaagtgcctattttgtatcttttggaatttagtggtactaaccaagatgtcaaaaatgtacgaaaaatcgtacacgatctttctgctggtgagagtactaagcaagtccaaaagcctaaggaattacgtgggaatatcagctttttgagtgattttagagattaaatatgactgaaaaatattacaaagcaattaactggaatgacatggaggaccgggttgacaaatctgcttggtcccgcctgaatgatattatctgggaaccccgtaatgttccagttagagaagataaaaaagaatttttacaattagacaagccggtgcaagatgccttgcttcacgcattcggagcactatctttttcatctggactccaaatgaaaaatgggctagagcaaattaaggtagatgccatcacaccagaggaagcagctgtgctgaatgccttgcaatatttggaatctattgccaataaaggctacagctacgttatcaacgagttgacggactcaaatatagcaaaagacgttattaactgggctgatgacaatccttacctgcaaaagaagattcggattttgaataaaatctaccaaggcggggatgcactacaaaagaaggtagctaacgttatcctagagacagctctctatcattctgccttctacgctccgctttatttattcggacaaggcaaaatggtacgaacagctgaaattgttaagttagctttacgtggcacttcatttagtgggatttatcctggttacaagttccgcttaggctaccaaaaattaggtaaaactgagcaagcagagctaaaagaatggatcgataacttgtacgatgtgctaattgataatgagaagaagcacattgagttaatgtacaagggcactgactggatcgatgatgttacgcactatctctactacagtgtcaacaaggcctacctcaacctaggtttttcagccaagtatcctgacacttctgattcaatcaaccctattattgaaaaaggggtcatcaagaatgcagtgcttgaagacttcttcttctacactaacgatcactcgctgactaagtttaaagaaattaaataattacaaaagacgcaatcgaaaattcggttgcgtctttttttacttcttagtagttttcttggttgcctttttagtagcggttttcttttctgcttcctttttttcaggcttcttatattcacgtattgtggttagcttttcaataattgcctccaccagttgatcaacaatcttcgctggatcttgttcgatctctacttcactggctaattgatcaattctaaagcctgaaacattaacgtattcagagcgcgtttcaaagtaaacatttaaaggatattccttaccctcttcaaagaagttagcaactcgtttgtaattgctataaggcaaattgataatatttgtctccaaggcaaaagtagccggccgctgacccgtcactgctagttgcgtttggatcaatgaattatgcttaaaagcagcgataacttccttgaccatcttttcagcatacggcttgattttgctcttcgacttgctaatgtcggcatatttaactgtttcaagatcttgaatataatcttgattttcaattttttcgttgagatcttttaaattaatttccaaaataaactttcctttttcattggttataattacaaaatactacaaaaaaattttttgtcatcctttttaaggattcaattcagtatttttagctttttatttgttaaaatgacactatgaaaaagcaaaaatttgatcttaagtatttatttttactcattcccattacgttaattctcattataggattgatttacctttttaacaaaaataaaatcgataatgaaattaattggatgacaatgaaggaagaacagcggctcaatgtcccgctagaaaatcaactgcccgatctacccaacggctgcgaggttactagcctatcaatgttactgaattactatgacattaaggttaacaaatatgatctcgccgataatattgctcatgttgattctttcaccgacaacggtaaatatcgcggcaaccccaatcaaggctttgtcggccatatgtctgtcgctaatgctggctggtgcgtttatcatgggcctttatttgacgttgcacgtaaatataccagccacatagaagatgcctctggcagcaattttttagcgattctcaagttaatctccgatgggcatcccgtgctgatcattaccacaaccacttttaatcatgttaacaatatgcaaacatgggaaaccaatactggtaaagtcaacgttacaccgtcatcacatgcctgcgtgatcacgggatacaacaagcaaaagaagcttgtctatgttaataatccttacggtattaaaaaccaaccggttaattggcataacttagaattgagttatgaccaacaaggacgccaggcactttacatcaaataacaaaaaagggcaagccacgaaggcttgtccttttaactcaaggcacatgctcaaagcatatgtggacgtttaaactgttcacatcagtgcgtccaacatcagcacttcccgtgcttgccacttaaggcggatgtcctctatctcataaatatacgcatctcgcgttcattaatcgactcgtcagtcagtaattgtactattttttatgtttgatgtacagtctagcacttttaaaatgacgatatttaaatttataaaaaacttcagtacacatagtcgataacatgaaacctaaagcaatagcaccagtaacaattgctactcgtagaagcaaattctctccttgactataatcccccacaactaaagcacgtactgcttgataagcaggcacgcccgggactaacggtactaaggcaggaatattaaagaccgtcactggactttttttaatgcgtgcaaaacacaagcccaaaatacctatcaaaaaggcgccaattaaatttgaaatcattcgcccaaatcccaaattaaagcaagtccaatatgccatccagcccactgtgccactgactcctgacaggtgaagatcgcgatgcggtacattaatagttaatgcaaaacccaccgaagctacataagaaaaaatgacattaataataatttctaaccaaagtggcatttttatactcctatgaatttaagtacaagtgcaactccaccgcctaaagctaaagcggttaacacagcctcgcacattcgcataatccctgataataaatctcccatgaatagatctcgcaaagcattagtaattgccaagcctgggactaaagtcatcagagcgccgatcaaaatattatcagtaatcatttgtggattaaaatgattgaataatactgccaagatccccatgaccattgctgcaattagctctgataaaaaacgaatcttagtatattttttaaactcataatacgaccaaaaaccaacagcccctactaaggcagcacctgggaaatcaacccagtcgtaattatccataaacaaaaccatcaaggtagcagacaatacagcagctcccaatacctggagccacattgggaaagtaggtgcttgtgatactaaagcaatcttttcttttaattcagaaagagtgatttttttaactgcaaattggcgcgacaagtcattaacccggtctactaattccaaattgatgttgcgatcacgaatttgtttcatctgacttagcttgccaccatctaagctcatgaaaacacaggttggcgtcgcaaaaacacgcggatcatcaattccggcattgcgagcaattctgagcattgtatcttctacccgatacatttcgctcccgccttcgatcattagtcggcccgcagttaaacaaatatccattacttcttgataaaattggacatcccgcttctcagacatagttttagcctcagttcatagtttcaatatcgatggtcttgtcgacccaatcaccgcggaaaaagtcacgttcgtgactaacaataatgactccgcctgggaagttaacaatcgcttttctcaaagcatccttggtatcgttatccaagtgattagtaggttcatcaaggaaaagcaaattagctggttcaaactgcatcttagctaattttactttttcctgttccccaccagaaagttcctttagtggactcattgcttgttgtgcagttaagcccatgcgtgccagcgcttgtcgcaattcctttggctttttgcgttcaaattcttcttgtaaatattggagtggagtcatgttgctattaggccaggttagatcttgcttgaagtaagccaactttgcagtaacagataactcatatgaaccataaattggctttaattgccctaacaatgtcttaagcaaggtagtcttaccaattccgttaaaaccagtaatcgccactttttcatccccaccaacagagaaattgaaggctgacttgaccaaagcatggtcgtaaccgatgaccaaatcttgcgtctgtagcaacaaattagaagcagtcgcaacatatggaaattcaaagcgtgccttgcggttgttttttggcggtgtcaaaacatccatccgcgccagctgcttttcccgtgacttagcactcttagcacgtgtacccgccttgttcttgcgaatataggcctcagtcttagcaatcttgcgttgctggttagcataagccttcaagtaggtctcacggttggctgctttttgccgcaaggcttgcttcaacgttcctgtataacgagtaattgtgccaaaatcgatatcgataatgcagttagtgattcggcccaaaaagtcataatcatgactaacgacaataaaggctccagcaaaattgttcaaatagtcaaccagccaatcaatatgtgaaacatcaagatagttagtcggttcgtctaaaaccagaacatctgggctttgcaacaacaactttgctaaaattattttagagcgctgaccaccagataacttagaaacatcgtgatcatagcctaaatcagctagtcctagtcctgaggcgacttgttcaatttcagtatcaatatcataaaaattattttcttctaaataagtctgtaccttgccggctttttctaacagggcttcgtccccgttttcggcatatttggcatacagatcattcaactctttttctttttgaaataattgatcaaaagccgtccgcaaaaagccacggatagtcacaccaggtgccaatttagcatactggtccaaataaccaacatcaattttattttgccaagttacttgaccatcatcgggcaaaatttcacccgttaaaatcttgattaacgttgacttgccaacaccattttgaccagtaacccccatatggtcttctttgttaagcacaaaattggcatcttcatataaagttttatcaataaaactctgacttaaatctttaacagttaataaactcatttttcatcccctattatttagctgattcatgttctttttcataattttggagtgcatcaagaacacgaggccaatagcgcttaggtaagatcagttgcaaacgatcatgataaataggaaaatcacttgcttttagccccgtaatcttagctagctcctgatctgtcagcttatatttataaacaatacgcttaatttcgactgatgcatgtcctctaaaataggataggccgaagaaaaagatagcaaaaacacttgctgtgatgattgctaattgcaaattcatcctgaagctgtgtagacaaataaaaatcacggcaataaaagaaatcacagctgagagtacaccgtaaataactggaaatattgattctttttcttccttttgcataatcttttcctccctaattgagacttagtaactttacgaacttagcagaaatcagccaaatttgcaagattctacgttttcactgatttttttacataagttaagtatacttagcataattaaaattgcacggagaaaaaaggaaaatgaaacaagaaaaacatccctgaattgtcaaattaagtgcaacagttaggttatgaagagatatattgcttgaagagttcctctgctgtgtgatattgaaggattcgacgatgtttgcggttaatggcatcagttgcctgttgaacataagcagctgacttatctttcatgcttttgcctttagggaagaattgacgcagaagtccattgcagttctcattggtgcctctttcccatggagaatatgggtgggcgaagtagatctggcagcctttgatctcggtcatatccgcaaactcagagccattgtcaaacgtgatcgatttaaaccaggcaggatgtctgtcaatctcattttgaagcagcctttggcatgtgcttgcccgatagtcaggaatcttgataactacttcaaagcgtgtggttctttcggtcaaagtcattaaagcaggctgattcttgcgtctgacgcctttaaccagatctccttcccagtgcagcggcgtttttctgtcttcaatctctttaggacgctgttcaatggaattgccaagatgcttcttgtgcaaagcatgaccgctatggccgtgatgacgcttgttcctgcgtcttttgagcttcataggcagatcaatattgcttatgtccagcaagccctgatcaatatagcgatagacagttggtgtgctgggacaagggtagcctggcatagtccttttgaattcaccaacgaattcatcgatgctggtggcatcaaatttagctttaaagcgtctggagagcattctcaaaaagacagcataatgcttcaatggattgcgctgatagcagtttttgcgacgcttctcataataaatctgtgcagtatcagcgtaatagtgctcatacaataaatagctgctgtctctttgcaggacacttccgcgtttgatttcgcgactgattgtcgacttatggcagccgacttcttgagcgataacagtacgggaagttatgccggaatccagcattgcttgaatttgtccacgttgtacgctggttaattgatgatagtgcttagaaatgctagaatttgaattggtcataaagatcttcctttcttgatttttcgtcacttcaagtttaggtcttcatggcctttttgtttaacacttagtgttgcacttcaattttaaatccgggcaagaaaaacattattatttcacaccaattcatttgcaaattaatgacttagacgtgcaactagttttgccacaagtcgagcaagcagcagaattatatcaagctgttgcctgtgaccgtgaaaatttaggtaagtggctgccgtgggcctacaaaatgaaaagtgcacacgatgaagctaattttattaaacaaattcaagccaaaatgaaacggcagtcaatactcgttttaacaattttagtcaataagcagccaagtggcatgatcgacctgcataatttgattccaaataaaaaagccgagatcggctattggctgtcgagtaaatatcaagggcatggtattgtcacgaagagcgtaacggcgttatgccagcatgcttttagtgagtttaacctacactatattgatctgctagttgctgtcggcaatgacaaaagtgcaaatgtggctaagcgttgtggttttaaattgatgggaattgaaccacagctaattaatgggcctgacggacaaatttttcgtttgattcgagggtaaatatattgtgttcgcttgttatcaaagctaatattagataaaatatttaaacaagtgtttgagcataacactttactataaaaatgaactcaaatataataaaagtgtaaggtgatatgcatcaatgagtagtcggctcatggtcaatctgattctaatgcaggacataagggcctgacgggtagcagggaccaaaattaaacctgatattacatatctaagacgcaatggcttagttggtggcagacaccaaaattaaaccgactttaggagttcacaatttgtggactccttttttacttggaggaaaagagatgaactataaattatttaaatcagttaatttaaaagaattggggcaattacgtcggtacatatccattatttataatagtgctgatttttatgataaacattttgtaaataaaaccatcatttacactactaaaaataataaaattgaactcactgcaagaagagataactttatgcatttatgtggaatttcatatatcgaagggccaagaaaattttttaatgatgctctagatcgaaaagtacagctaaaaaagttcttattaaaaaagatggctctacttttcagaaattacaagttttaaatcaacttaaagaaatgttaggtccacacttaagattaacaggacgtggagcctttacatacctaaaattcgatcattctttacgtacaaataaaacgatcttggctcttgcattattaaataatcaaaattatatggttccaatctctttgctaaatttgaaattcatccatccatttcctaaaggagataagattattaaaatagaatctaaagatctaaatactggtaagattattactcttagatgattcgcagctaaaaccacccagtcaaatctttaataatgaaaaagataaccggcaccaataatgatggcaagaaattcagagtcttaacatcacgaatttttaataaagacaaaccggagcaagcaatcaaaaagccaccaacaatagacaattcagtaactaatggacctgtaaaaaaatcagccgacaaaaattttgctaccaagtaaatgctaccttgccagcaaaataaaaccggaacgaccgctagcatcccccaaccaaagctagcgccaaagaccatcgaagttactaaatccagcatggcattggtaaatagcatagtattgtttcccttaactgccgccatcacgggacccacgattgacaaagcaccaatacagcaaagcaaaatctcagtagctagacctttagctaaattagatttgcctgctttatcaactaagtgattaaaacgaccagcgatattgagcgcggtaccgactactccacctaaagccaagctaacaatgaacaaaactggatagtgacttttaggcatgctgttagtcacattctcccaaccgatgcctaacgctgccagtcccattgcgatgaacaaaacgtcttcataacgcttattcaatcctttctttaccaagcagccaactgtagtaccaaccagcaaagcgcaagtatttacaattgttccgatcatttttctcacctcttagttttattttaccgcagaaaaaaagtatccatctcggatactttttcatatttaccatttaaaatgccaactactactcgatgacgctgaagaactagatgaagatgtgctttcacccgtacctgaaccataaccagaattcgaaccacctgccggcttatcttgattttgatcataaatccgataattggtgaaagcattgggatcatcccacttgatgtgattgttctgatcattcaattcattttgccgcgtttcttcattgttcaaagtttgtgtttgcaaattcaggttcttacgaattttatctgacgtcttttgtagttccttagtagacgccacctgaattgaagaaccatcaatccaagcatcatgcccttgaatgtagccactctttaagctattcatgcagccacgataattgagcgccaaactaagcatatcattgaatgtcagattagttttcacatatttattgaaaatatctaccagcttgcggtaattgccaagcgtattaaccgacattgccttatgtgcaattgcctcaatcacctgacgttgccgcatctgacgaccatagtcaccacgtgggtcttcttttctcattcgaacataagccaccgcgtgccgtccatttaaatgctgcttgcctttgtggaaatcacaccagtcatacgagaagtcaaatggaacttggacatcgacaccaccaactgcgttaaccaggctttttagcgccttcatattaacttctagataataatcaattggcacatttaacattgatgacacagtcttcatacttgattcatgtccaccgatttcataagcagaatttacccgaaacatgaagtatttattttctggatcgcccttaatatctgccaaagtatcacgtggaattgaagtcattgtcgcagaattcttttgtggattagctgttgctaaaatcatagtatcggaattaccacgatcatggcgaccttcaatcccctggtcaacccctagaactaggatagaaattggctgtttattggcaattttagctgaagtagcagtgttgccgccgtttttaccatcaatcacactatggacggtaaaatacatgtgagcagcccatgccatgccaaaacaagcagttaataatactgccacaccaatcaagcgggcaaaaaagttacctgatttgagcgctgatgcatctgcggctaaagcacgattccgatgaagattaagcgatgaacgatgagcgcgataaccttctcttcgttttggattttggtccattcttttgatcgtttcccttcgaatttaatacaagttagtttatttgtatcacttttaatctctcgataaaataaaaatgctaataattaataataacttatttttttgcgaaatataacgcaacaagctaagatgtatagaaaatgaaatattatggaggtaaaaatggcaattccaactagaaacgaagtccctgaagagcttaaatgggacttaacccgtatttttaaaaatgacgatgaatgggagcaagcttatgcagctgcacaagaaaaagtggctaaacttgctgaattaaaaggtacactagctaaatcaggcaagaacctgtacgagagcttaaccaaaatcttagctgttaaacgtgatgtggaaaatatctacgtttacgctaccatgtccagcgatgttgatacttctaattcgcactatctcggctacgtcagccgggtacaaagtttggctaaccagtttgaggctgcaacaagttttattaatcctgaaatcttgagtatccctagtgataagcttgagcaatttaagcaagctgaacctagattaaaggattacgcacactatcttgaaacaattactaacaagcgtcctcatacattacctgctgagcaagaaaaattgatcgccgatgctggggatgctttaagtgtttctgaaaatacctttaacgttttgaccaactccgacatggaatacggttacgttcaagacgatgacggcaatatggaacaattatcagatggcctttattctttgctgatccaatcccaaaatcgtgatgtcagaaaaggtgcttttgatacactttatgccacttatggacagttccaaaattccttggcttcaactttgtctggcgttgtaaaaaagcacaactataacgcacgtgtgcacaagtataattcagctcgtgaagctgctttagccgataatggcgtacccgtagcagtttatgacactttaatccaggaagttgattcacacctagacttacttcaccgttatgttgcgctacgtaaaaagatcttaggcctgaaggatctgcaaatgtgggacatgtatgtgccactaaccggaagaccttctctttcatacaatttcgaagaagcaaaagagacagcaaaaaaggctttggctccacttggtgaagactacttgaagcatgttgactatatttttaataatcgtgtcatcgacccaatagaatctaaaaacaaggtaactggtgcctactccggtggtgcttatgataccgatccttatgagttgctcaactgggaagataacatcgattcactttatactttagtccacgaaactggtcactccgttcactcctggtacactcgcaatactcaaccttacgtttacggcgactatccaatctttgtggctgaaattgcttcaactactaatgaaaatattttgaccgaatatttcttagaccacattaccgatcctaagacgcgggcctttatcttaaattactaccttgattcatttaaaggcactttattccgtcaaactcaatttgccgtgtttgaacaattcttgcacgaagccgatgctaagggagaaccactgaccgctgacactttagacgacgtttacggtcaaattaatcagcattattacggcgatagcgttgaaccaggcggcgatattgcccttgaatggtcacgaattccacacttctactacaatttctatgtgtaccaatatgcgactggctttgcggctgcaacggcattagcaaacaaggtggttcatggaacgcctgctgagagggatgcctaccttggtttccttaaagctggttcaagtgattacccaactgagatcatgaagcgtgctggcgtagacatgactaagcctgactacttagaagatgccttcaagacttttgaaaaacggttgaacgaatttgaaagcttgattgagaaataaataatcgcgctcatataaaaataatcgatatcatttcgtgagatttgatatcgattttttgttgatgatcttgatttattacttggcatatttatcgctcaatatgtataatacgtatataagtattatagtgccagaaaaggtgaaaaatatggctgaaactttatataaaaaggtcgttaaaaatggttcttccttagctatcaatatcccagctaaggaagtaaaagagcaaaatctcaaagtaggcgatattgttgaagtaaaaatcaaaaaatcagaccgtcctaattctgaaaatttaaaagaaatagatggcttaatttctgattactgggatatgttagagtacttaaaggataagtagtcaatgaagatcaattatctaacagaaaaggatattttagtaatcaatgcaagggttattcaaagagaaggtgcaacgggacaaaaacctcacgttagggatgcagaagcccttcattttttagttgttcaacctaagcaaactagttttggacaagaattatatccgtcttttgctgaaaaagctgggattttattaattaaattagttaaaaagcatgtttttgaagatgcaaataaacggactacagcaattgcattcttactatttttacgacgcaattcttatgaactaacctgtgattggcaagatttagcaaatcaaatcttaaagatcgctcaaatagatgacaatgaactaaattaccaagaaatctatcaatgggttaatcaagtaattcatgaaaactaaaaataatcgatatcattttcgccctaatattatattttatatgaaataataaccactttataaaaaaataagggctattaacccttattcataataaatccatcaactatttcctatgtcatactactactcgattgtcctgcataaccagctagtgtagcctgcaagtcatgaataactttaggagcattaaaatttttagcaaattcgtactgttgcaattgataatataatctagaaccgatatataaagcagaatcattattttccgcttgatcaattgttctatccaaaattcttaccaaatttggattatcaattacatctttactaaaacgaactttttctagttcattttttaactttaaagtctcatccttcttaatcattatttacaccaaaggatgcgcaaatggtccatccttctgccatccagtatacataatacgaccaacgctatcccacatttgtgctaaattatcatgacaataatatcggttgcaatatacaccattaccatagtaatggtactttccgcctccgcgcttgtgatgtgtaccgcctaaaacttgacttaattgattttcttttagttcttgaaactttaccattccagacacctccgataaatctttaagcctgcctcacttagtacttctatcaacttacatatataagtctaccaaaacagtagtgttttctaagaaaacgtcagaaactggcaacgttcatatcatattctgttaaaatacataatttgatcaagaatttagtacctgtcgatttaccaatcaaatactccagttacaataccgttagcacccactgctgcatatctttctagtttcagctgaagttcaactatagctttaggtagttcattttcactaaagttttctttcaatttcaaagacaaattagaagcaatcgattgaattgactcatgcttatcagctttcgcaatagcagcttgtaataactcaaccaattcggcatttttcttaacttgaggatctgaaatcactgtattcaatctactcttaaatgcagcttcttctttaagattctttttaaagaacatatttatctccttgtattaaccttgatttttcagaaaatcatacaactcagtagctgtttttcctccacctacccatgcgttagcaatttcaccgtttttaattcgcataacagtgggagtacctggcacttccaagttatcaaaagcataatctgcattatctttactttcatcaatatttaaatagtataattgaccaccaatcagattattaaattcatttaaagtggctgaatattgtcgacaataatagcacgttgggcaaccaatatacaaatatctatcaatattatcttttttatcgaaaaaagaatctacttcatctgaattaagagactgtaaaatattttgtgtaaggatgaatgattccttaaatttatttctttaaacattagaaaaaggagttcctttctcgtatgattggtttgaacaaaaaaacacatacagaaagaagaactccttcatgaatgattttaccaaagattttgctcaagctctattcaatccagacaaaataaatgatttattgcgcaaagagctacaacaggctgttaataacttgttagaagctgaattgactgcctttctgggctatgatccctatgccagaaatggctggaatactggcaactctagaaatggtgcttatttccgcaaagttgatacgcaatttggcccaattgaagtgcaagtgcctcgggatcgcaacggtcaatttcatcagcacacgctgcctggctacaagcagcactcggatatcttggaaagcatgattatcaagctttactccaagggcgtgaccaccagggaaatagccgatctaattgaaaagatgtatggcagccattacagtccagcccaggtatcaaatatttccaagcagatgattccaaaggttgaggcttaccacaaacgcaagctaagcgacaagtttttctgcgtctatttggatgcgacataccttcctttgcgccgagaaacatttgagcgtgaagcagtctatattgccattggcatcaagcctaatgggcacaaggaggtcattgactactgcattgcacctagcgagaacattgaagtctggacagatatgcttcaaaacatgaaatcccgaggcttaaagcaagttgagctttttctttctgatggtgttgttggcatgaaaacagccttggccaggacttatcctaaagctcattttcaacgctgcttggttcatgtcatgcgcaatatctgcgctaaagtacgcgtcgacgatcgtgaaaagatcatgaacgaattcaaacaggtgcatcaacagacaaacaaagaagaagccacagctgtcctgcatgacttctataccaaatggggcaaggtttacagccatgttatcagaagcttgaaagacatagaaccagatctgctggtcttttataactatcccaagcagatcagagcttcaatttattcgactaacatgattgaatcatttaacaatgtgatcaagcgcaaagctaagcctaaggcagagtttccaactgaacagtcgcttgatgcttttattggcattcaggcaatgagctacaatgaccgttatttcaatcgaattcataaaggctttggtcaggttcaggacaccttagaatcctactttgattaaataaataattaaaaaatcaatttacgagaaagaactatttacacaaaagatttgacagtttcttaattggagacgctacaacttgccaatttatagctaaaatacctaaaattaataaaataaaaatatttatacgcgtggtgctagttaaatcgttttagttaataaaaaagtccaatcggactagactcaagttgtagtatcaaaaagaaaagagtctgatctgattgaactgccttaagcttaagcgttttagccaccatttacaagttagttttaaagatttagtgataatttgtcggcactggtatcgtttgtatgcaccggctgagtttactcatcggcgaaatattgatcaaattaaaactacggacagtctgattttggctttacttatctggcaagctaagacaggaattgaatcacaaagaagattctgtgaatgtttcaattgtttatcacactcacgttttaatcgacgttcacgtcagctattgcaattgatttatcagatacggcaagaaatgaataaaaaggttgacctgaatggacagttcttgatcattgacagctttccggtacctgtttgccaaccaattcgcaactatcgtgctaaaatttttcgcggttatgccaacattggttataaggccaccaagaaaatttacttctatggtttcaaagttcatgtcattgttagcgatgacggttacattcttgattatgtcgtaacaaaagcatcagttcatgatgccagggagacagttgaactgatggaaaatacccatccatctaattactatcttcttggcgacgaaggctatttaggcaaagaactgcatcaacagctaaaacaaatgggttatgaactttggacaccatatcgtaaaaatatgacaggagctaaaaagcacaatgatcatcaattgatggctattcgcagaacaattgaaagcgacttttcgcttctgacctattacaatgccgagaacaatcgagcacgtagtctgataggctttcaaagccggttggaaattgcaattttagcttataatttggcttattgtctagaacgatttaactagcaccacgcgtatatttgtatatttttattgctttttcatagttttatattcctacaaaaatctcagcagcaaaacaatggaatcacaattggtgccacaagttttactgttctaccaacatccttaccaaatttatagcaattatagcctcttttaccacctacacattctagtaagttttcatcttttaaactttcaaattttttcataattattcctcacctcgcatatttacatagtccttccttaaatccacgccaatacttaccttccgacttccaaaacttgttccatcctttactacctcctacaacacttaccaattcgtttgaacttaacttttcaaaaccaacagtattttccatttttatacctccgataaatttttaagtctacctcgcttagtacttctaagcgcatcatcaacttacatgtataattttaaccaaattaattcaatatccatgttatcgttatatattgttaacatatacatcacgcgtggtgctagttaaatcgttctagacaataagccaaattataagctaaaattgcaatttccaaccggctttgaaagcctatcagactacgtgctcgattgttctcggcattgtaataggtcagaagcgaaaagtcgctttcaattgttctgcgaatagccatcaattgatgatcattgtgctttttagctcctgtcatatttttacgatatggtgtccaaagttcgtaacccatttgttttagctgttgatgcagttctttgcctaaatagccttcgtcgccaagaagatagtaattagatggatgggtattttctatcagttcaactgtctccctggcatcatgaactgatgcctttgttacgacataatcaagaatgtaaccgtcatcgctaacaatggcatgaactttgaaaccatagaagtaaattttcttggtggccttataaccaatgttggcataaccgcgaaaaattttagcacgatagtttcgaattggttggcaaacaggtaccggaaagctgtcaatgatcaagaactgtccattcaggtcaacctttttattcatttcttgccgtatctgataaatcaattgcaatagctgacgtgaacgccgattaaaacgtgagtgtgataaacaattgaaacattcacagaatcttctttgtgattcaattcctgtcttagcttgccagataagtaaagccaaaatcagactgtccgtagttttaatttgatcaatatttcgccgatgagtaaactcagccggtgcatacaaacgataccagtgccgacaaattatcactaaatctttaaaactaacttgtaaatggtggctaaaacgcttaagcttaaggcagttcaatcagatcagactcttttctattattactatttacaagtcgagtctaacaagattggacttttttattaactaaaacgatttaactagcaccacgcgtatacatcatatttcactatgttacacaacttgataaagcatcattttactttgtatttccaaaacagtttaacaaaaaatcatcagtaatcgcgcttatacaaaaataatcgatatcattttgccaactatgatatcgattatttacatgctgtttgatattgaatttttttattttctagatcgaaccagttaagcccgcaaatttccacttatctggattctcatttaacatgatctttaacctaattagtgcctgtggtaatttaaaaccatgtactagtgaataattattcaaatcacggttcagttcaaatactaccttatcaaaattaacaccctgagttaacttgcttaaaccttgattgattaacttcgttgcatctcgatcatttacagtctcttgtcttaattcctcaagaatttttttaagattttgtccattatcttgcaattttaagtcgcttccttttaattaacctctactgccccatggtccatattgtaaccatccattggctacggtttgacccgctttaccccaaattgcaccgtaatctgggatagttttatgtgtcttagtattatacaacatatatggagttaatcgaataattttaccaccaacaactctatttagctcaatattatttactaccttaaaattcttcatttccaatacctccgataaatctttaagcctgcctcgcttagtacttctaagcgcctcatcaacttacatatataactttaccagaatagcaggattttctatgacattgtcataaactgacaatattcacatcatattctgctaaagtacataatatgaacaaaactcatttagaatttagcaccctggatctaatataattaaagtagctagctcttcccgtaataattgacacttttccctgcatcccataccgcaaaaaatttctctctgacttggtagtttttaccatagtttccacttcaaacatacttatttttttctgttgaacagggtaagtacctatattagtaatttttccattaagtatttcagatgttccctgcttattttcaatattaaacttcatacgttgacccttatctagcacagccacttcagagctaggaacgtacgttattactcttaatttctttctatcccttatatcaggcatcgcaacactattcttattatctagatgaataataacattattttctaacataccttttttgccatcagctagagtgacactaattcctttagataatttttgcccttctttatattctttattctctaacgttactacccgatctggagtaataactcccatactattcatcacattttcatgcacagcaaaaaatgatccaataaatagtaaaatcacaaaaataaaagctggtaaaattatcattgtcgaaaagttacgaaaattatatgaatagaatttactactttctaaatcttgatcattcatttaatatcacctagcttttcaccaaatcataataatacccatgtttagccattaattcactgtgattaccttgttctacaatttgaccctgattcaataccacaatattgtcagttctttcagcaatagctaaacgatgcgcaataaatataacagttttattctttaacctaattaaattatcaaccacttttttctcagtaattgtatcaagcccacttgttgcttcatcaaaaatcaataccttagcaggtgaaagtaaggccctagcaattgttaatctttgcttctgaccacctgacaaaatcttagcattttcatctaattgtgtattaaatcctaatggcaatttttcaatgtcattctttatctccgcgatttggcaagcttcttctatctctttttcagttatattcttacgacttcccaacaaaagattctctttaatggtacctgcaaaaatatatggagtttgtggcacataattcacatatgagcataaaacatgcttatttatacttctagtcgaatgaccattaaaagttacttttccttttgtgggactgaaaaaatcaaccaacaatttaaccatagttgacttacctgatccactcattcccacaatagttaatttctcattatctttgatcgtcaaattaatatcttttaagacatcttcaccatatccataacgataatcgacatgtgagaaattaatgtctccatttaaatcatgactatcattaactgaagttttgcccttaaattcactttgaactaaataaacttcatttaaacgattctgagctacatttgcagcttgaagtgtaggttgcaagttaataatattttgtaatggatcaataaaatatgataataatgcattaaatgccatcaattcaccaatagacatctgattatgcattacaacacttgcccccacccaaagaataatgacattcagtgataatctaataaaagttttcaaagcagtttgaaaagcttctgttttgctatacttaaaagctttttttaaataatcaacaaactgactatcaatttttcgataacgtacttgttcactgtttaatgctttaatcgtctcaattccttgaatatcttcaataattgatgaactaactaccgcattactttccatctggtcattatttaatctttcaaacctttttgaaaagccgagaataacaatagcatagagtggtaatgaagctagcgtaatcaaaaacaatgtcatgttttgaaccgccaaaattatacccattaaaattacaattgaaagatcaaggaataatgaaatcaccgtacttgccaatgcatctataattctacttgcatcagaaaaacgagaagtaatctcaccagtttttctggtagtaaaaaattccatcggtaattcaaaaatatgcttaatgtattgtaaattaagatcgattgataaccgctgccccaaaacattcaataaaaattgctgaccatatgaaaaaattgagttaaagacatatgcaatcaataacccaatagctaaaacagataacgtggtaaatgtaccgttaggaatatatgtatcaatcaacccttgtacaaaatatgagctacagatactaatcagtgtcatcagcaaagcagctaaaataatgtttctaactaactttttctgtttaaacatataagggaataatgataatagattattctttttctcctttacaggcttaaaatctgccttaggcaccataaacaatgtaatacctgtccactctttttcaaacgcctttttggacatttttttaattccactagtaggatcaggatcggctacgattatttttcttttagtatttttaagaactacataataatgtaacaatcctccatcttttatcacatgaacaataaaaggatattgaatatctttcatattgaataaggacatatctgcttttaccgcttgaacatccatattgaatttttccgcagttttaactaatcctaaagcagtagttccttcagtattggttttagcaatatgacgtaaatgtgctattgatacttgagaatgataattctttaagatcattgctaaacaagctgcaccacagtctgtttcatcgatttgtggaacataaattgatttatacgttaacatgcccatcatttatctctttctgcttagctaatttctctgttttataattatatctagcaagaaaatctttcatcattttcacactactacgtgaaaaatcttcaacatccccattaacaaatgagacacgatgctgtttcaaatcaatcgactcaatgttcttcggattcaccaaacaagactggttaatcttctctaacataggattttctttagcatattgattaatactacctaaaagttgcatttcacctgtcgtcaagatcattaataacttgtgcggggttatagttgttgaaatataaataatatcatcaatattgacattcctagtttgacgtccaattttatacgaaaaagtcattttcttcatataattgaatttgtgtaagttgtagatagctacttctacagtctttaccatcatctgtctaaatttatccaaatcagatgtttttacaatgtagtcaattggacctaatcgtcttctgaatgtaattaatgataagtctgcatgactagttacaaagataatttgagctcgttcatctcgctttttaattaaggcagccagatcaaagccagtatcttcttccgtatcaccgcctaattcaacatcaagaaagtagataccaccatctaatttatgtttcttcagataatcaattgcacccatgtaatcagttgcagatgcaattgaaaattcaatttcttcatcatctgacaaaatcatttccgcagcaccaagaattttcttagtttgctcaatttgattttgatcatcatcacaaataaatactggatattgcattttttatttttcagtcccactttcactatcaggcaaaattgttaaatcaaaagtaaaccacccatcatcaacatagtaattaacaatcattgaatcttcatatttatgagtaatttcttttacattcgctagtcctaaacccatatgatgtttcttggttgtataattcttttgacttattttatctgtcgctactccactttttctaacgcgatttcgaatttcaaactcgaaatcgccgttttcttgataatacattgcatctattcgcgcactattagagttacctgtttctttgatcaaggcctgactttcttctgcagcattatcaaacgtgataccaattattctgaccagatctaaaatattaacactatcaggaattcgagaaatgtcgtgttcacaatcgaaactataatctagacctaaactgtagagttttgataacttagcaattgcaatactttttagattgttttcatggatatgatttacgcccttatacttacgcaatgcttttttattaaactgtgtttcagtgtagtgatcgagaattttaacaacctctttagagttaccttcttgagcgcttacttttaaaccatttaaaacattttgataatcatgcttaaagcgacgcaaatcatcttcgtttttgtcaagataacttgaatattcccgtagttgtttcatttcagaactcaattgctgctgcttaagaatcaattccttgttttctgcttcttttgctttcctgtcagcgtttgccaattccagctgcaattgttgttccttttgctctcgtttggttagaagatctttttgaattttaacagttgtcaaataagcaaatacagaaaaaattatttgaagtatcaataaacttaaagatacttcaaataataccgtcatatgtgtactctgtaatgctaaaaaatacacaatggaacttgataaataaacatataatattaatccaataaatattgaattatttcgatcatttaaaagctttcgaattttcgaaactgtcaaatcttttgtgtaaatagttctttctcgtaaattgattttttaattatttatttaatcaaagtaggattctaaggtgtcctgaacctgaccaaagcctttatgaattcgattgaaataacggtcattgtagctcattgcctgaatgccaataaaagcatcaagcgactgttcagttggaaattctgccttaggcttagctttgcgcttgatcacattgttaaatgattcaatcatgttagtcgaataaattgaagctctgatctgcttgggatagttataaaagaccagcagatctggttctatgtctttcaagcttctgataacatggctgtaaaccttgccccatttggtatagaagtcatgcaggacagctgtggcttcttctttgtttgtctgttgatgcacctgtttgaattcgttcatgatcttttcacgatcgtcgacgcgtactttagcgcagatattgcgcatgacatgaaccaaacagcgttgaaaatgagctttaggataagtcctggccaaggctgttttcatgccaacaacaccatcagaaagaaaaagctcaacttgctttaagcctcgggatttcatgttttgaagcatctctgtccagacttcaatgttctcgctaggtgcaatgcagtagtcaatgacctccttgtgcccattaggcttgatgccaatggcaatatagactgcttcacgctcaaatgtttctcggcgcaaaggaaggtatgtcgcatccaaatagacgcagaaaaacttgtcgcttagcttgcgtttgtggtaagcctcaacctttggaatcatctgcttggaaatatttgatacctgagctggactgtaatggctgccatacatcttttcaattagatcggctatttccctggtggtcacgcccttggagtaaagcttgataatcatgctttccaagatatccgagtgctgcttgtagtcaggcagcgtgtgctgatgaaattgaccgttgcgatcccgaggcacttgcacttcaattgggccaaattgcgtatcaactttgcggaaataagcaccatttctagagttgccagtattccagccatttctggcatagggatcatagcccagaaaggcggtcaattcagcttctaacaagttattaacagcctgttgtagctctttgcgcaataaatcatttattttgtctggattgaatagagcttgagcaaaatctttggtaaaatcattcatgaaggagttcttctttctgtatgtgtttttttgttcaaaccaatcatacgagaaaggaactcctttttctaatgtttaaagaaataaatttaaggaatcattcatccttacacaaactattttacagtctcgaatttttaaataatacttttggattatacttatagttgcgatatctagaattaaaaaagtccaaataacactaccaacattaataccaaaaaataatgatattatttcaacgccaatagtcgtaagcaaatctaccatttcaaaaaataatattgcaccaatatttgactttatccttttatctctttttataaaatatgagaataaaagaatacatatgacttgaaaaatatctactacgaagtcatttattttagcggtgaagctagttgtaaaacaagctaaaacaaagaaaatcgtaaacactaaatcttttttttggaatttccaattagataatttataaaaaatacgcgtggtgctagttaaatcgttttagttaataaaaaagtccaatcggactagactcaagttgtagtatcaaaaagaaaagagtctgatctgattgaactgccttaagcttaagcgttttagccaccatttacaagttagttttaaagatttagtgataatttgtcggcactggtatcgtttgtatgcaccggctgagtttactcatcggcgaaatattgatcaaattaaaactacggacagtctgattttggctttacttatctggcaagctaagacaggaattgaatcacaaagaagattctgtgaatgtttcaattgtttatcacactcacgttttaatcgacgttcacgtcagctattgcaattgatttatcagatacggcaagaaatgaataaaaaggttgacctgaatggacagttcttgatcattgacagctttccggtacctgtttgccaaccaattcgcaactatcgtgctaaaatttttcgcggttatgccaacattggttataaggccaccaagaaaatttacttctatggtttcaaagttcatgtcattgttagcgatgacggttacattcttgattatgtcgtaacaaaagcatcagttcatgatgccagggagacagttgaactgctggaaaatacccatccatctaattactatcttcttggcgacgaaggctatttaggcaaagaactgcatcaacagctaaaacaaatgggttatgaactttggacaccatatcgtaaaaatatgacaggagctaaaaagcacaatgatcatcaattgatggctattcgcagaacaattgaaagcgacttttcgcttctgacctattacaatgccgagaacaatcgagcacgtagtctgataggctttcaaagccggttggaaattgcaattttagcttataatttggcttattgtctagaacgatttaactagcaccacgcgtataaaaaataaataaatctactattggtgaaattaatccctgtatcgctatcattactttaatccaagaaactttttccaattaaagtgaaacaatgggcgttttgacttattaacaatattattcattgcaaacaaattttgattaaaaaccatattagtaatagcaaatccacctttaacctcaactagctcttcttcattcaactttttcattatttatgcttcctttcaatttaatgcactaacaatttttacactgttaatgttactacgagcgcaactttatgattaaaatcgtcatattctgtaccatttagatcatattctgcattttcaattaaaatgctcctccaccagaaccatttccccaactattcgacttcttcttgaaaaaatagcgtttagattttgatcgtccacccacaatttagacatgaactagatagcttccgcatattttctcttcccttcatttaccattttgttacaaataaaagcataactctatctagcttctcaaaattaagctcatcagattttgcattatcctaatcatattttgctaaaaataatcaatcctctttctcctctggccaaaaaagatcatctaatgtcttatccagcgcctggcaaatcctgatacacaagttaaccgacgggttataatttcccttctcaatcgcagaaatcgtctgtcttgaaacatcaatctgctgcgccaaatcttcttgcgttaaatctttaccgactcgcgcagccttcatttttaaatttttcaatccttatcactttccttatcacgatggagttgaaacaggcttactgctccaataatcaaccaataaatccccataatgttcagcgcactgttaaagtcatcaatatatcctagaatcaagcaaataccaagtaaaatatatagccaactatttgccttaacatgctcttcattaaatgcaaaatatgctccatggactatatcgtaaactgacatcaccgttaatgacaacataataattgcaaagttaacagcaataccatgctttgtataaaaatccgtctgcatgaataaagcagaaattacttctccaacgattaacacaagaaagctatacctgtcaccacgaccacgaatcaattcctgtcgttcatcatactttgccgcacgacgatttcccacgaatacaacgactaagatgaaagtcataactgcaaacaagcttgcaaaagccattaattttaatatttcaaattttgacattttacacatccctttcttttaatagtttgatattaagcccatattttcaaaatgtaaagtatgttttacatttttactaataaatttgtatttataaaaactagcattaacataatcggtatcatttcactagatttgataccgattatttgttaatgatacctatttttcaaaaatttccttgacttcttcttttaatcgtcgtattataatgacaattaaattaataaaagcttagaagagatgagtaattacttaagacttctgcagagagtcggagttggtgcaagccgatgtggttgagagtaatgaatatggtcttggagctagtttaaagagcaagctgttaagtaagcaatttacgagtgacgatcgttaccccgtccgagtattcccaattttgggagcacttagtaaggagttagttgtgaagctaacttgaatttgggtggtaacacgcttaggcgtccctagcatagaaattctatgctaagggcgctttttattttgcttatttaatttttcagaaaggagccagacaatggataaacctatcaaaactacaagttcacaaatcatcatcagtaaaaaggcattcaaccgaatgtgcactattgtctggttgatcttgatcatcatcggacttttcatcgttaaataaaacatcgaagcaaaactaaggagaaaaattatgacagaattacattacgatatcgttggtagctttttaagacctgcagaattaaaaaaggctcgcgcagaatttgaagaaggaaagattaagcaagaagaattaactcatgttgaaaatacagagatcagagaattagttcaaaaagagattgatcatggccttaaaatcgtaactgatggtgaattcagaagaagttattggcatcttgataccttctggggctttgggggtattaaacacactaagcaggcccacggctatttcttccatgatgaagaaactcgtaacgactctgcccaagttgagggaaaaattaaatttactggtaaacatccagatctttcatcatttgaatacttaaaaaaggttgtcgatgaaactggcgctaacgtaattccacggcaaagtattccagctcccgcacaattttacgcagaacttgttcgtggagaagaaaatattgccgcacttaaaaagatttatagttcagaagaagatttactcaccgatatttctaaagcataccgagacttaattttagccttatacgatgcaggatgtcgcgacattaaactcgatgactgtacttggggtatgattgtagataagcgctattggaaaagtcatttacaagatgacttttcactagacgaccttaaaagaaaatacttgaagcttaacaatgatgcaatcaaagatttgccaacagatttgcgaatatcaactcatatttgtcgcggtaactatcactcaacttgggcagcccaaggaggttatggtccagtagcggactatgtttttgctaaggaaaatgttgacgccttttatcttgaatttgacaatgatagatctggcagttttgacccaattgcacaaattcctaacgacaaacttgttgtcttaggtttagtaactagtaaaaaagcagaattagaagatccacaaaaattaatcgctagaattaaagaagctgctgaattccacccactaaatagtctcgctttaagcacacagtgtggcttcgcctcaactgaagaaggcaacacgttaaccgaagatgaccagtggcaaaagatcaagttggttgtcgacactgccaagcaagtttggagctaaatggcaattaactagttaaaataaagataaatagatttagacaaaggagaaaaaaatcatgggaaaagttgaaagttttgaattagatcatactaaagttaaggcaccttacgttcgtttaatcactgttgaaaaaggccaaaaaggtgaccagattagcaacttcgatttgcgtttagttcaacctaataagaacgccattcctactggctgcttgcacacgattgaacaccttttagccggtcttttacgtgaccgcatcgacggctacattgactgttcaccatttggctgtcggactggcttccatcttttagtttggggcaccccatcaactactgaagttgccaaggcacttaaggagtcattagaagaaatccgtgacaacattaaatgggaagacgtaccagggacaacgattgaatcttgtggtaattatcgcgaccactcattattctcagctaagcaatggtcaagagatattttggctgaaggcatttctgatgacccatttgaaagacatgtggttgaataaaatttaaaggtttaactgaaaaatagtaaataattaaaaaagctagcaattcattttagtgaactactagctcttattttttcacttatatcatcccggcaactaagccaactatatacaagaagacacagcagactaccaaatacaaaccgccccacttgaccgtttcttttaggatctcgccttcgtctccctcacgattaattgagccggttgctactgcaatattctgcggtgaaagcatccctgccgtggcccctgtcatgttcgaggctacaacccagtacttacttacgcctaagtccgttgctgcagtatactgcaaattaccaaataaaacattagctgatgtagcagatcctgttaaaaatgttcctagtgcaccaattaacggcgcaaacaatggataaactggtcctaaaaggccaaccaaggccactgctaatgcattcgtcataccagcataaaccattaccttagccaagcctacaatcgcacaaactgtaattgtagttttccatacgctttttatcgattgtcctaatatttgcatcatttttttcaagctgacaccctgaatcgccccaccaattaatgtagctacaaaaattaatgttccaggagaagataaccaactaattgacaatgtatttgggttctttcctgtataaacaacaagattagtggttactttattaagtacatcattgacagctggaactaatgaagaagcaaagatcacgaagataaagaccaaaataaatggtgaacatgccttgagcatttccttagcatttggacgtaaaacatctggctcttcttcatcatcatgccatctagttaataagactgtaatcgcaattgaacacaatgagccaacaattgcaggcaattctgcccctacaaattttgcagctattacctggggaatagccattcccagtcctgacatcaatgtaataaagcctacacctttaattgccttaatgctgccttcagtcaagataactaaaataaatggtaccagtattaccaaaatagataattgcaatgttacgatgaaggatagtttttcttgatgtagacccgtcacttcagctaaagttaaaactggtaatccaattgcaccaaaagccgtcgcagttgtattagcaatcaaactaatgactgacgcgcgaatcggatccaagccaaaggcaatcaatattcctgccgcaattgctaccgcagtcccaaagccagcgattgattctaaaaagccaccaaatccccaagcaataatcaaaacaataatccgcttatcggttgaaatcgtcgccagcatattttgaataatttccataccgccagattctgtagtaacgttatatgcaaataaagccatgacaataacaaacataatcggccaaatgcccatgataatgccttctagcgccccacttgccgtatctagcaccggtactttaaaactaaagactgctaacaccatcgtcaaaattaagccaatgacacaagcgcgtgcagctggcattcgcataactcccagcgaaataatcaaccaaacgatcggcaacaatgcgatcgcaaatctaatccacatcaaaatcctccatcatcaaaagtgttgtactatattatttaatcatgatttgggtaaaaagttaaaataagacacaaaattttagtttaaattacaattttcacaaatttcacttgcaagtttaaccaacaaactatataacaattaatggaaagtaaaatttctcacatcatgtttgaactactccgtggaatagagtagttctttttttgcgtaaaaaaatagccagaccgaattcagcctgacttctgttttttttagcgatgtttaattacgtgaataccataagcgattaagtaaattaccacttcgatcgttgcaataaagaaagttaccggccagttggtgataaagccgagatacagtccagcccacacgccaactaaagcgaaaaacacggaccaactgatcattgctggtattgttttaccaatatagcgcgccgttgaagatggcaatgttaatagaatgaagactagcaatgaaccaacaatctgggcaccgatagcaactgacatagccaaggctaccaagaaagcaataccaacccagccagtatgtacaccatgtgcaacggcaccgatatggtcaaatgagtcaaaattcaagcttcgagctaccaaaataattaatagtaaaactagaattgacaaaaccactagctgaatcacgccttgtttatcaacaccgatgatactaccaaacagaatattagtagcgtaacggctatttgatccagaaatggctaagaacagcacacctagcccaataaacagagctgagatcgcactaactgacgattctttttgatcgctgtgcaaggacaattctcctactccaattgaaccgagcaaggtaaatagtagcatcccccataacggtgcaatgccgataaagacggcaaaagctgctccagcaaagccgatttctgacagtgtgtgagctaaaaaagcataactccgtgctactacatatacaccgaccacgccacaggtaatcgcaatgaatgtactagctaagaaggcataacgcataaattcgtattgaaacattattcgaaatcctccttaaatttatccatctttccttgcctgatcgttcccttatttaaatatagataatcagtcatatactttttagctaaaggaatatcatgagtgacaaacaaaacggtaattttgtgttcacgattcaggtgcttgattaatcccatcaattcttccttagcagccggatctaggctagctgttgcttcatctaagatgatcatattgggatgatcaagtagagcctgcgctaaatatgcacgttgtttttgtccacctgatgcctcacccattcgggtattctgaatcttttctaaatgagtttcttctaactgatgatcaatctgttccttaacctttttggtcttaaacaatggggcgttaagtccaataaatgcacgaatcgacaatggatactccgcatcaatatttctaaactggggtacataacctaacttaacgtctgaatcaaacttaaagttgcccgcagtcggctttaacatccccattaaaatcttaattaaggtggtcttccctgttccattaggtccaagtagtgcagtcattgacccgtcttcaagctgaaaactcaaatcttgaaaaacatctttagtatcaaatctcatcgagagatcatttacttctaaaatcactcttctaccccctccctaagttgctattatttttctattttagccaaattttgataattttctttcatccaagccaagtaagtagtgtggttaggaatagtctcccgcacatttaacactggaatattattttccttagctaattttacaaataacttcacagttgaactgcttgcctgtgtattgttaacaaagaatgcaatcttttttgctttaatttcattattcatttgattaatcatcttaggactcggatcagtaccattctcaattgcttcttcaaagcccttatccccaatcttgtatcctgcttctcttaaagcataatcaaagacaggttcactaacaaagactggcttactatttttcttattagtcttcaccaattgcttaacttgattaatcttagctaaatacttgtcaccattagctttaaaataagctgcatgctttttatcaagcttagataaacgcttaactaggtaattaacatacttggttggcatacttagattgtaccaaatatgcggattatcccccttctttaatcccatcaagtcttcaccaactaagacaggctttttgctaacagaactagctagcttattcatccaagaatcatagcctaagccattagcaacaataatatttgccttggtcaattctttagcatctgccgtagttggttcaaaatcatgaggatcggtactgctattgctaatgattgccttagccgtaccatattttcctacaacatttttagcaatatctgcataaacattggtggtggtaataatcgagacttcacccgaattgctcgtcgaatttgatctattcgagcaagctgaaactaacagcgcaataacgccaattagtcccaaaaaagagattaacttcgtaattttagatttcgcattttgcataaaatatcctccttgtgcaaaataaaaaagcatttaagttagaaaattcagcataaattctaactaaaagttagaataatctagttaattacatatgtcaacatatttttgcatagacaaatagcaccagtctcccataagcctgatgctatcaataatttaagtcataaaattttgctgaattttattaaatgctttgttctaaaattacattattatataaacatatttttatataattgtcaaactaaactaaaattcttccttcacgtgctgacgcaaaacatctaagattttaatcacatgcttatcttctaagctataatagcgctcctgcctaacccgctcgctcttaactagcttagcctcttccaaaatacgcaagtgacgcgaaatagctggctgactaacatcaaactgcttaactaaattattaacactacttttttgattatcatttaaataatataggatttgaattcgaatcggatgattcaacgctctagtaatccgaataatttgctcgtccaatttcttcacccattcatactttttaatttattatagcttaaatttaggtatcaaaaaacgctacccttcgggtagcgcaaaacataacagagtatcttgatttaagtagagatcatcaagatatttatattataatacgtttttgccaaaatgtattgttttttgattaataaccaggattatttaataataatattcgatattacttatagtattattcgtttgggtcttctttgacattcttcttccagaaactcatgattaaaccagcaacgattgaaccaataatagtagctaggaagtagaataagatgtggcttggaccaccgatgttaccagcaagtggtgatacccaaagaccaccgtgaggagctgggacaccaacgtgccataaaccaactaaagcaccaccaacagctgaaccaatgatacatgatggaattacacgacctgggtcagcagcagcaaatggaatagcaccttcagtaatgaatgagaagcctaatacccagttagaaacaccggcacgacgttcttctacagtgtacttgttcttgaagaatgtagtaccaattgcagtagcaaatggtggaaccataccacccaccattacagcagccatcaagatagcagcagtagctgagtgagggtcgttagcaaatgcacctgaagcgaagacataagcagccttgttgaaaggaccacccatatcgattgacatcattccggcaaggatagtggtcaaaagtaccaagttaccagtacccattccgttcaagaaatgagtaatagcaaagttaatgccactaaagattgggttaatgatgtagaacataattgctgcaataaagagcaatcctaaaattggatagaacagcattggcttcataccttcaacagaacgaggtaatttagcaaatactttcttcaaaccaaccatcaagtaaccagcaataaaaccagcagcaataccgcctaagaagccggctggtgaagttgcgtgagcttgaacgttaacttggaattgaccgttaacaatagaggccatgtaaccaccaacaaaacctggcattaaggctggcaaatcaccgattgattcagcgatataggctgccaaaactgggaccatgaaggcaaatgccaagttaccagcattgtttaaaaagatgaaagcaggagtcttagcgccacccatgtagttttctacgatgaatgagatggccattaagataccaccaccaataacgaatggaagcatgtgactaataccattcatcaagttcttgtagatacctgcccacaaacctggcttctcagttgatgaagattcagttgacttgtcttgagcacttgcatggtaaacatcagccttaccaccaataatgtcatcaattaattcgcctggtttgttaattccatcaacaacaggacggttaactaagtgcttgccgtcaaaacgtggcatatcaactttcttatcagaagcgataataacacccttggcacgtttaatttcgtcaggagtaagttgatccttaacaccttcagaaccgttagtttcaattctaacttcaataccgcgcttcttaccttccttaatcaaggcttcttgagccatgtaagtgtgggcaataccgttaatacatgcagtaacaccgacgattaatggcttgttttcatcatcgttgttaccctgtgccttagcagcttccttagccttcttagcttcagctgccttcttgtcttcttcgtcttttttagcttcagccttttcaaaaagatcgataacttcttcaggggtcttagcattctttaaagcttcaactaagtcaggatcaattaataaacctgaaagttttgccaaagcttgaaggtgagtattgtcggcaccatctggtgcagtaatcatgaagaataagtgaactggttgaccatcaagtgaattatagtcaattccttccttactcttagcaaacaatacacgtgccttgttgatgtacttgttacgtgcgtgaggcatcgcaattccgccaccgataccagtagttgattcgttttcacgtgcccagattgacttaataaaagcatcttcgtcgttaacgatatcagttgctacttcaaggtcagccatttctttaatggcatcttctttgttcttagccttaagctccataatcatggagtcagggcttaaaatatccttgattctcatatttttcccctcgttttttattaagaaatttgctcaactttgatttgtggaagaacagcatcaatttggctcttaactgcaatgtccttagtaaaggcagtagcagcaccacaagccattccaattctgaagccttccttaggatcttgggtcttgtagtaagtaccaacgaagccggcaatcattgaatcacctgcaccaactgagttaacagcagtaccaacagcacccttagcatggtaaacatgatccttggtaagaaggaaaccaccttcaccagccatagaaaccatcacattttgagcacccttatctaaaagcttttgtgcgtattcaagcatcacatcacttgaatcaaaagttacgccaaacaagtctgctaattcatggtggttaggcttaattactagtggcttatatgccaaagtatcaagtaaagcttgtccagtagtatcaacaacaaattctgcacctgcttctttaatagtaggaagcaatgattgatagaaatcagttggaaggcttggagtaagagaaccgctcattactacaatgtcgcccttctttaaatcgtttaaacgatccttaaaagcagtgatttcttggtcggtaatgttaggaccagccgcgttaatttcagtttccttttcagcgtggatcttaacattcacacgagtgttatctgaaatagtaacgaaatcactttcaattctcttttgattcaattgacgaaccaattccttaccagtgaagccacctacgaagccccatgccgtattatcaacatttaattggttaaggatttgagaaacgttaattcccttaccccctgctaaaaatgaatcattgttagttctgttaacttctccgcggttaactttttctaattgaagaacatagtcaagcgctggattaacagttactgtataaatcatcctattttgcctcctctaattcaataccgactggtaatgaccgtttttgacctggttttagttgatcagttaccacaatcacgtcacttgtattggcaaacacagcaaagttacgctcaccgattttactattatcagttaatacataagcgtgtcttgcctgtttgatttcggctgccttaaccgcagcttcctctggatcaggtgtagttagattgccatttttttcaattccattagcaccaacgaagctagctgaaaaattcattgccttaatctgacttaaggcggtctgacctataacagcatgcgtatcgtccttaacttcaccgccaattagaattgtgttaattccgtgatttaaactgcataaagcagtctctacaccattagtaataatcttgacgttagcaacctctgctaaaaatggtaccatctcataagttgttgttcctgcatcaatgaagacattgtcacctggacgaacaaaattctgcacggcatatctagcaatagtgatttttgcgtcatgattcaaactgaagcgaacgttttgtgatacatcacgagaaaaatgtttaactgattgggcaccgccatgaacacgcttaaggatcccatttttttccatctgaattagatctcgacggatagttgattcagatgttgcggttaagtcacataattcacttacgcgacataactcgtgttgattaacatagtcttcgattaagctttggcgctcctgagtcagcatcatttctcacctcgataaatattgtattcgctttctcctccaaaatcaatcatttttcttcaaaaaatgtcatttttatttattatcgttcaataacattcatttatatgcaaaaaagatgccgttttttgattgaaacgacatcttttcttcgtcatttggaattattcttagtcgttttaccctatttgactaagaatccgtaaagatgactaagaaagagaaccaaagatctattaaccttgcaaaagcaaaacacgctgaatcattattgattcagcgcgttttactattaaatatattttgtctagcctctcaagctacgcttaaagttttgccatgggccgacatcatctgtttgcaaaatcaagtttggatagatttttctaatccagataaatgacgctactgtagcggctaaagcaattaaagcagagatagctgcctctaaattagttgcgttacccataattactctagctggcattacaaatgatgatagaaacgggatgtacgataatactttagcaaaaatcgtatccccacctgattgcatattgactgtgaacaagaacccgatcaacatcaatgtagatagtggtcccaccgctttgttggcattctcgcttttagcaaccaaagcgccacagaaagctgcaaagataataaacaataccaagccgattatcgtaaacaccaatccccaagaagccagattgccaattgcttgatcaatcatcggcttatactgtctaaataaatcgctaaagccatcgatgtatggggccgcgcaataaactgccacaaaaccaacaacataaattaacacttgggtgataatttcaccaaaaatacctaaaatcttcccagtgaaataatcgccacctggcatactcgaaaagattacttccattatcttggtacccttctccgtagcgatatcttgtgctgttacttgcgtataagtgatcacaagcatgtacaagataatcagcaaaacccagaaggaaatttgcttaacaggatcattatcaaagctcttcttatcaacatgcttaacttgttgcttaaattgcgctcgcgtagctaaagactgagtctgttttgtcgttagcttggccttacttaaattcaattgttgctgggcggtgtttaggctagttagcagctctgattttagatcactgtccattttttcatcactatagtaagttgcagctaattgattattcttttgttcaattaaaacatagccatcgatatcttcatctttatacgcctttttagccttagcttcagtgctatagttgtcaaagtcttctgactttttaattgcttgctttaaggcagaattagaagtaactaccccgacatagttgtcatcactgccgccagctgataccattccgataacaaatgaaaagaagacgagcagaaacggtgctaaaatcatcagcaaatatgaccaagttttcacttctctacggtaggtttcttttgcgacaagccagatcttattcatgacgcgcacctgctttcattttgaaaatctcgtctaaagttggaggttcctggtcaaaagtctggatatattgaccggccgaaagttggttaaaaatatccttaccatatttttcgtctgcaagaataagcagcttcattccattgttttgcaaaattatatcttttacacctggtaaggctgataattcagtagcacttttgtctgtcctgacaaaaattcgagttaggccaaagctgttcttaatttcatttactgggccattcaagacgatatgcccatcattgatcattacgacgtcatcgcacaattcttccacgttacgcatatcatgatcagaaaaaatgatcgtagcgccttttcttttttcttccaaaatcagctgcttcattagatcaacattaacaggatctagtccactgaatggttcatctaaaataatcaatttaggttgatgaattaaagttgcaatcatctgtactttttgttggttacctttagacaaagacttaatcttatccatggggatccctttaacagccaaacgtgataaccaatcaggcaattcttcttttacctttttagccggcatccctttaaggctagccaaaaacactacctgatctgaaatagttaacttaggcatcaaacttcgctcttcaggcagatagccaatattgtcataatctttagcgttgaaagaatgtccatcaatactaatctggccgtcataatcaacgaatttcaaaatactatgaaagatcgtcgacttacccgacccatttttaccaaccagtccaagaatacgcccatctgacacactgaagctaacatcaaacaaaacctgtgttgacccgaagcttttatttaggtgttctatttttaacataatttttcctcaactttttatctaatggttattagacctagaagtacaccgtcaaagaactgccataaagtatcggttgaaaaaattgtttttacaatatcaactgacccccaattggttactaaagtaatcactacaccagctgaagcaaccactactcctgtaccaataacttgaggggcaagtttcaacactttcttctgccatggaatctttgatgcgaccgttttattaaggactaagcttgcggacatgatgccaccaaacattagaccgaaagccaatccggctccaatcgacataataatttgaaaaggttgaggcgaaccagcagtcttaacatacatcatcacaagagctaatattggtccaacaagtgctccaattcccatgccttcaataattcgtttgttttcacgagcaaatttttcattattcattgttcttacctcaaggaaattttcagctaattaaacaaatccgaaaacttagtcggaatgttgttcttggcgaagtatttcttgaatgcatccccaaaactcaattgatctttttctctattttcaagcaaatcatgaacagctaagaatgctgtaacggcgtaattaacggctaaaatgattaacaaaccgagcacaatataaattaagtacagcattgttctttcctccaattcagcgattatctcccaggaaataatcttttatccttttaaattaatcatatccccatcatttatgtaaaaggtaaaaccgtccaattctgtcatttttcggactgattttgcattttattcttcatcttttttataaactaataaattccctggttgacaatccaagacttcacagatcttgctcaacgtgtcgaagcgaacgccatgcgcctttcctgtcttcagaatcgacaggttagccggcgttataccaactttctctgccaactcctttgaagacatctttcgcttcaagagcataaaatctagtgtcacttcaatcatctatatcaacctttctaaataatcgagtctgcatcctcctgaaccttcattccgtacttgaataccaagtagactacgtatagtactgctaggaaaagcaaaccagttgtcacaccacttgggtatagtacattattcgaggatttagcgaaccaagtgcggtgagttatgaaaataatgtaatctattattgaaataagggtatatccagcaactgaaattaataatttcttgagtaaattcaaattactatcagcaaagtaaacttcttgcttgatattcttaacaattaatctggcatatcgacagattaaaaaggctgcaacgctcatcatgatcagtgatagcaacacaaccactattgcaccgatatagttatcaactgatacgccttttatacccctaccactttcaaagccagcacgaaaatccggattatgtataccaaataacacaacacctcccataacgatccacataattattcctatcacacaaaatatttggtaaatccaagcaaaaatcgtaagcaaattcaaaattaattttttcatttttctatcctctcaaaatatggatgattctgtatatagcactgccaattacacccgttactccaattactaataatgtaattctaagaacactccatgttccgcctaagttagcaaacactaagattgccatcattatcagcattccaataattgaacctatctgtcttttcttttctggaagcatatctatccctctcttccataaaactatctatctctttctcgtcttttataattattgtattacgataatttataattgcaatacagaaataaaatatttttttgagataataaaaaaataccaaattagtcgttaaactaacttggtattatgttttatcttccaagctactgctttttacttttcttcttatagtaagagttcatgaaaatattcataaagataacaaaggctacactttcaactatattccaaaatactgttccaaagcttaatgttttgtactgaaaatagtcccataccaatcctattaacagggccaaaataccagcgatgatacttctgtttctaacttggcgctcggttaaaattttatttttcataatttttaccccattattatcatatcgaaaaataggaaatctattaaccgaattttctattttttaatattatctatgtttatgttttttatgtctattttgtttggcgaaatctttaacagcgccttctacacatccttttatcataccacttccgctagggagcgcatcaatgaaacccgataaacatgatccacctacaccaagccagttagtgccaccacttactttttctaattctttataattcatttctttcatcataaaagttacctccttttttacaaatgtgatacacaagaaactgatccgctaataatacccacattagcaccaaatatagctccacctactgtaccaattggagtaccaaatgcagtgcctgcaatgccatattttagtccatccttcaacgctcccattccaatagctttagcacaatttgtgatttttctacggcgtcttgctttaccaccgttaccaccgaaaacagctgacagttcttcataagttaaagtttcaaatttgttcatgtttttcccctttataaaacttctaattacaattttcataagtgaattaagttttacctctcttcaacttacacactaataatacaaaacaatttaccttcattggcgtataataccgatttagcacgaaacaagatctatttggaaaatatttaccaaatcggccaagttttcgtatattagtaatttacaaaggattcttattaattgttacgctaacttgatattctgttttataaatccgaaaactagtaaaaacatagacacaatgcacttattatgagaatggctaacaaaaaaatcttctcatagccaaggctacaagaagattgccatcacattaatgcataaactgatacgcacgctctttactttaataaaacatgatcaattatacgactataacatagccactcaaaaccaaaaacttgagtcgaaatcaaataatcatttttagcatagtaacctacgaaaaaaatcacaagtttcataggtttctttgcgttatcttctaagtattacgatattttctattggagatatttttagcctattcgcaccagtatttttttcaatacttatctactagttattatctacctctatgaaaagaactttggaaaaacttaggattttccaaataaacgtctcgtttatgattaccacctttcttactgtataaaggtagcatgtgttcagtatcagttagaccaatatcatctacagaacctgacccacctaaaattccgcttaaaagtacttcatctttagaaataatgattcgtttcatctacttttcctccttagttttctttcctaatgaaatgcccaaaactaaactgattaagatactaatcattccaattaattgaccccagatattatccttctcacctgtagatggcaaagactgagtagaaccatttttaatagtgtcattttccaatcgctttaacttagtaattctattttgattgttcttaacggcactataaggcttgctttgcacttttactgaatcaaattgtttattttctttcacacttccgtgtttttcactaactgctgctagaataatattctttttatgcgatttagctgttttcttgaccttagtggctacgattttaggttttactggcttcttcacagttttcttcttagtttcagctctaggagccgcatactcttgattacctgtcgtaactttagtcagatctgcagtagagctagcaacatttgcagcattctcaaatacgctattttcaacaaagtcagtaatagcaacgtcattgctagactgtgtttgatcatcttcagctacagtcacttcaggtatttcattactttcagattcagtagtattatcatccttcggttgatccttaattactgcctgttccactaatttattagctgcatcagaatacaaaaagttatataactcttgtcccgtcttttctccaccgacccatgcactaataatttttccattaataaatctcattgtagttggagtacctggaataccaatttctttgaaggcatactcatgtgctccttcttcagcatcaatattgaaataaagcagcttacctttaacgatttcattgaaatcttttaaatcaggtgaaaattgtcgacagtagtaacatgttggacgaccgatatacataagatgttcttgattatttttctctgctagaagatcttttacttcttgcatttttactctatgaaaatcttttacattgttctcataatcttcaacagatacctcatcttcatcatcttcactatcttcctcatttgcattattaggatcttgattattagtattctgtgactgattattttgatcttcagaagctgctggctcttcttcctgcttattttgagtttgagctgcttcgttcttactactagttttctgctcagattcggaaacatttttatcatcattttctgttttagatactacttcacttttattctcttgagaagtattaccttcatccgcatgcacaatagtactattcatcatcaataatactgctgggctcaacattaacattaatatttttttcttattcatagatcttcctccgtattttttataactaagaaaaatatatcaattatcagctatctttttggttatcagacttattcagtacactttttgaccaaatcagttatcaaaataattggaatttgattctaactaaaaaagagcttttcagctccttttaattttggttaagaattttatccttaaaatattcaaaatatgtactcttacctgtaataatagttgcgttgccttccatcccatatttcaaatttttcttggacttggccttacagattacttcatagacattatttccgcgtagattaatgggatatactccaatttctttcacttttcctactaatctatccattgttccactagcattagctacctgaaaatacagtgtttggcctttttttattgccccaattttattacctgggaaataagtaactacattgaccgttcttttagccttaatcatcggaaacaagtgaactgtattctcctgtttatcatcaagatgaactagccatttttctctatttcttctaacaatttgtccttcatgatagtttctattggcaatattaagtgtattttgtggttctacaattccggtagatgtaactgtactttgtctagttgcaaagaaagaaccgactattaagatcagaactaaaattgccataggaataataatcatagttgaaaaattcttgaatttataggaatagtattcggtactctcatagtctttattattcataacgttgctcctaattctcaactaagttatagtaaaagccatgtttctgcattaatttctcatgacttccttgctcaacaatttgaccatgatctacaaccacaatattgttagtcctttgtgcaattgctaaacgatgagcaataaaaataatcgttttatacgcgtggtgctagttaaatcgttttagttaataaaaaagtccaatcttgttagactcgacttgtaaatagtaataatagaaaagagtctgatctgattgaactgccttaagcttaagcgttttagccaccatttacaagttagttttaaagatttagtgataatttgtcggcactggtatcgtttgtatgcaccggctgagtttactcatcggcgaaatattgatcaaattaaaactacggacagtctgattttggctttacttatctggcaagctaagacaggaattgaatcacaaagaagattctgtgaatgtttcaattgtttatcacactcacgttttaatcggcgttcacgtcagctattgcaattgatttatcagatacggcaagaaatgaataaaaaggttgacctgaatggacagttcttgatcattgacagctttccggtacctgtttgccaaccaattcgaaactatcgtgctaaaatttttcgcggttatgccaacattggttataaggccaccaagaaaatttacttctatggtttcaaagttcatgccattgttagcgatgacggttacattcttgattatgtcgtaacaaaagcatcagttcatgatgccaaggagacagttgaactgctggaaaatgcccatccatctaattactatcttcttggcgacgaaggctatttaggcaaagaactgcatcaacagctaaaacaaatgggttatgaactttggacaccatatcgtaaaaatatgacaggagctaaaaagcacaatgatcatcaattgatggctattcgcagaacaattgaaagcgacttttcgcttctgacctattataatgccgagaacaatcgagcacgtagtctgataggctttcaaagccggttggaaattgcaattttagcttataatttggcttattgtctagaacgatttaactagcaccacgcgtgttttatcttttaatttcattaaattatctactacttttttctctgtaatcgtatcaagcccgctagtggcttcatcaaaaattaaaattttagccggtgacaataatgcacgtgcaatagttagcctttgcttttgcccaccggataaaatcttggcattttcatccatcttggtttcaaactgcagtggtaattgttcgatttcagactcaatttctgctatctgacaggctttcaatatatctttttctgtaatatctggtcgactacctaagagcagattttctttgattgttcctgagaagatgtatggtgtttggggaacatagtttacgtatgaccgtaagacatgcttatctactttagtagaattaaatccattaaaagttaacttgcctttgcttggagagaagaaatcaactaaaagtttgaccatagtagacttacctgagccactcatccctacgattgccaacttatcattgggttcgatttttaaattaatatctttcccggatttaaaattgaagtgcaacactaagtgttaaacaaaaaggccatgaagacctaaacttgaagtgacgaaaaatcaagaaaggaagatcttcatgaccaattcaaattctagcatttctaagcactatcatcaattaaccagcgtacaacgtggacaaattcaagcaatgctggattccggcataacttcccgtactgttatcgctcaagaagttggctgccataagtcgacaatcagtcgcgaaatcaaacgcggaagcgtcctgcaaagagacagcagctatttattgtatgagcactattacgctgatactgcacagatttattatgagaagcgtcgcaaaaactgctatcagcgcaatccattgaagcattatgctgtctttttgagaatgctctccagacgctttaaagctaaatttgatgccaccagcatcgatgagttcgttggtgaattcaaaaggactatgccaggctacccttgtcccagcacaccaaccgtctatcgctatattgatcagggcttgctggacataagcaatattgatctgcctatgaagctcaaaagacgcaggaacaagcgtcatcacagccatggcggtcacgctttgcacaagaagcatcttggcaattccattgaacagcgtcctaaagagattgaagacagaaaagctccgctgcactgggaaggagatctggttaaaggcgtcagacgcaagaatcagcctgctttaatgactttgactgaaagaaccacacgctttgaagtagttatcaagattcctgactatcgggcaagcacatgccaaaggctgcttcaaaaggagattgacagacatcctgcctggtttaaatcaatcacgtttgacaatggctctgagtttgcggatatgaccaagatcaagggctgccagatttactttgctcacccatattctccatgggaaaggggcaccaatgagaactgcaatggtcttttgcgtcaattcttccctaagggcaagagcatgaaagacaagtcaaaagcttatgttcaacaggcaactgatgccattaaccacaaatatcgccgaatcctccaatatcacacagcagaggaactcttcaagcaatatatctcttcataacctaactgttgcacttaatttgacaattcaggaattaatatcttttaatacatcgactccatagccataatgatagtcaacatgatgatattcaatctcacctgctaattgcttggcatccctaatctgagcatctttctggaactcactcttaaccatgtatacttcattcaatcgattttgtgctacattagctgattgtagagttggttgaagattaataatgctctgaagtggatctacaaaatacgatagtaatgcgttgaaggtcattaattgaccaatgctcatctgcccgttcattacaaccttagcccctacccagaggataattacattgagagataactgaatgaaggtctttaaagctgactgcaaagattcagttttactgtaacgaaaagatttcttgaggtaatcgacgaattgactatcaatcttacgataacgtgtttgttcgctatttaaagctttgattgtttcaattccttgaatatcttcaattactgaagaacttaagacagcattactctccatctgatcattattcatcttttcaaatttcttagaaaagctaagaatcaccactgcataaattggcaaagacagtagagtaatcacaaatagagtggaattttgaattgccaaaactattcccatcacaattacaattgaaagatcaagaaataatgaaataactgtactggcgagtgcgtcaataattcgactagcatcagagaaccttgaggtaatttcccctgttctacgagttacgaagaattccattggtaattcaaaaatatggcgaatgtattgtaagttaagatcaatacttaatcgctgacctagaacatccaatagaaaattttgcccgtaagaaaagatagagttgaaaacatatgctatcaataaaccaatagctaggatcgacaaagtttggtatgtaccgctaggaatataagtatcaattaagccttgcaagaagtatgagctacaaatactaatgattgtcatcaaaagagcagccaaaataatattagtgactagtttcttttgtttgaacatgtatggaaatagtgaccacagattttgctttttctctttgagtggctcaaaatcatcatttgggaccataaaaagggcaattcccgtccattcttgagaaaacttttctttagacattttcgttaaaccaacgctaggatccggatcagcaatcactaaataatttttggttgccttaatcacaacataatagtggagtaattcgccttgctttaagacgtgtacgatgaaaggatattgaatgtctgcatcaggatcaaacaaggacatgtcagctttaactgcttcagtttttagattaaatgcttgtgctgttttaactaagcccagagcggtagtcccttctaaattagtgcgggctgaatgacgtaaatgggctaaaaatactctagaatgatattttttaagaatcatagctaagcatgcaactccacaatctgattcgtctacttgtggtacataaattgatttatactgtagtaacatcttttccactcctcatattaagttgaatccattatttcatgattggaaaactaaatgtaaaaaaataccaaatcggttattctcattaccgattcggtattttagttttctaactagattgagctactcaactttaatattttcaaatttatctacaagctttttaaccacggctttatacgatctagaataagttaccatctgaccattatcaaatataataatgcgttccttcgtgtcaattgcactaatgttcttaggatttaccaaagaagattgcgaaacttttgccaagaatgggttttctttatcaatctgagtaatatttgccttatactcaacttctccattctcagtaaccatatgtactttatgctgtgtagtactgtgttcaatgaaaagtatatcgccttcggccactttacatacgcgccgaccaatcttataagtaaagtcacgttgactaaacttaattctgttagataaattatcgaaggcgttacgtaacgtttcttcgatacgttgaataatcttatcagacgacatagacttactaatataatcaattgcaccgatacgacggcgatacgttaatggagcgtacttatcgtacgccgttacgaagatgatctgggcattttcgtcattcttcttgatgaattcagctaaatctacgccattcttagctttagactctcgacttaattcaatatctaagaagtagataccattcttaatatcatttgtgactatgtatcctaccgcttgagcaaaatcgttagcaacaaacgtaacagattcatttaattcagcgtaaccttcattatcatctattaagtcttgaatagatgcattgatattcttagcaatctgattagctaaatctttatcgtcatcgcatacaatgattgggaacttactcatcctcttcaccatcttccgtatcaattgtcatataaaagtcgaaccagccgtcttgaattgtataagaaatagacatatcaggatatttactctcaatttccttaatattagctaatccaagccctttatggtctttcttagtagtaaagccacgttgttgaatttgactagttgagatatttttattttggattttatttctgatttcgaactcaaattcatctgggtcatcagaatagaccattatttggacttcagcacttcgaatatcatgcttttcggcaatcaatgctttactttcctcaattgcattatcgaaagtaatgccaataatacgtactagatcgagttcatctacatggtctggtaaattacggatattatttcgacattcaaaattatatggtatatccaaattatacaattctgttatctttggaataataatgctcttaattgatttaacgtaaatgtgatttaggtctttatatttaagtaaggctttagaatttaggttagtttcagtatatttatctagtttctgaattacttcttgaacgttaccttcttgcgcacttacctttaaagaattaagaatatttttgtaatcatgtctgaaggcgcgaagatcatcttcacttttttcaagataagaagcatattcttcaagctgatgctgctgttgctttaatttttcttgatcctttttatttaaaagtttttcttgtaccatcgtcatttcatgatatataaatatagcaaaaatagtttggataagaatatagagagaaaagaacaaagttaatggtgtaaaagatttgctttgaatatatatgatagagatgctcaccgtagaaacataggtataagctaatatgcctacgaaaattttattattttggtttgctagataattatatatttttccattacctagttttattgcaactatcatcattagtattagtaagaaacgtagtgataattggcctatcaaagtaaatgacataacctgagtgatcatatcagacacaatatcaactaataaatctaatgtgcatactaatattattgaaccaaatagtatttctaatgtattattttttctcaaatataatacaaaaagcaaagtttcaagtatatttgtgaagattacgccaatattacctatagacaataacaaccctaaaaaaatattagcaatacacaaaaatagaatctgtctctttttagatcttactcttgatattttaaaaaaacaccatacatctgctaaactagaaaaaacattaagaaaaagaaataagactatcttttccatatattattccaaagttttttactcaagaaattaaaaccaacatgtgccgtgcttccaccaacaaccttagtcaattcttcttccttcaaaacagtctttttaacattttgcttcttcatgatatttcatcctttcatgattttatactcaacttgtttacacctttaatatatcatgtacttttaagtaaattaaaaaagataccaattcagtcatactttcgtaccgatccggtttcatatttcttcaaacgtaaacaactgacaattaattttcttagctaattcctgacagctatccgtaaagccagatttggaaaatagataataatgcttaagtggatacttgaagatttcactatttgtaatcaatttttctaacacactacgagagatcggttcattcttccatttacattcgccgaaatatccatcacgttcatcgtcagagaatcctacaatatctaactcaacttgttgatgtgttctcttatcggttccccaccaattgcccaagtggataaacggattaggaacaattttttcattcatatcctgagaccacatgaagtcttgactgtatttttcaaactcaggtcccatgaaatcagatagacccttttgtacttttacccaagcaagatcagttaagccacgctcaattagatcggtttgcttgccaacaaaggtataccagaagcggaacatcccgtcacagatacgataaacgatatttttgcttttactcttcttttgctcagtaaccggtaactttttctcaacaatacctaaatctatcaaattattcaggtacgtggttagcggaccagtttgtaagtgggcggattgcgcaattttactatgcttagaagcacctgaagctatcgcattgataatcgaattatagttagttggatcgcgtaattcctgttgtaacaagttattaggctcatcaaataagcgacctgatttactcaaaaagtttttcttaatattatccgcaactgacatgctgtctgacatataactcaaatattggggtacaccgccacaaaccgtattgatgataaaagcgtcctctttactgagttttggtaacatttcatgtgcttctgataatttaaatggttcaagctttaaggctaaagtgcgacgaccatatagtggactttggtagcctaagacttgtcgttccataaatgacatcgatgaaccacataaaatcaaaaataggttagtttctttgaattcatgatcaatgtaggattgcaacattgaactaattgtagggtaagccttagccaaataaggaaattcgtcaataactaaaattacacgttgtttttgagctaggtgtgtaatttctttaaagcattcctcaaaatttgcaaatttttcttttccaccctgatctgtatttttaaaaatactaattgcatcagaaaaacgttttagattatcttccgcattttcttcaagtgctacataataaattgactttttatcttttaaaaactcattgatcagtgaagtctttccaattcttcttcgaccatagatcactgtaaattaaaaatcattttcttgatacgcctgattcaattgctctaattcttgatgtctacctacaaacatagcgcactccttttcactacatcgtaatatactacattatattatactataacacgatatagtataacgtaatgtacgtgtattctatttttgtaataaaaatggccgttacttagagaaatagcgaagatcattaaattttaacatgctataataacaatagaacaagaataaaaagttttagcgtgcgcgttgaggtagctcctcaacttagtcattaacgtgtggctctgctttggcaaagcttttttgttatgttaataccctacaaaaaagaccgtgcatccctgcacggtcttttcatcttatcacatctattttctaacgtattcgccgttcttgtacttaaattcaatcttcttgttaggcaattgaaccgtaattctgcgatatacaggaccgaagccgtgcttttcaagcttaactttcacgctaccgtccttgtttaccttaaccttgtacaagttgtattcgcccttttggtacttaaagtcagttccgttatcttgatagtgaacgtacttaccctttttaccaaatagtctaaaggtcatactctcgtctggttcaccagagatgtggctaacttctttaccccatggcaagatagtgttcttcttgataaacagtggcaacttgccaattggtgcatcaaccaaaatcgtggtctttccagcatgttcaacaccattccagaaatcaatccattttccttttggcaaatatacggcacgcttggtttgaccttcttgaacaactggggctgccaaaatgtcctcgcctaccatatattcatcattcaagttatacacctgtggatcattttcataattaaggacaagtggacgcataattggcaaacctgtcttagtttcacgatagaattcatcgtaaagatatggaatgaaacggtaacgcagcttcaagtacttacggtaaattgacaaggttggttcgccaaatatccatggttcttgtgagcgagttcctagagccgcatggtttctgtacaatggactaaacaatgcgccttcgatccaacgagtcaacaattcaggtgttgtgtcagcaccaaagccaccgatatcagtaccggcaaagctgaatccactcatacctaagttacataattgtggaatcatcatttggacatgtgtccataaactttggttgtcaccagtccaaactgtggaaaacttttgcgttcctgcatatgctgcacgcgtaatgacaaatgggcgttttccactgaatttcttcaaaccttcataagttgccttagccatgttatgaccatagacattgtgcatcttcttatgagttgaagcttcttcttcattatggaagacgatattttgtggaatttcacccttgaaggatgcaggttcattcatatcgtcccagatacctgaaacaccaaggtcaactaagtacttgcagttcttagcccaccacttacgtacttctttgcggccaaagtctgggaagactgaatcgccaggccaaacttggtttacataaacagtgccatctggagcctttacgaagtagcccttttcgataccttccttgtagatcttatagtcatcatctttcttaacgccagggtcaataatcgtgattattctgaagcccaatttacgcatcttagctacgaatttctctggtgactcatagttatcttttctccaggtaaatactctgtagccgcgcatataatcgatatccaggtgtaaaacgtcacatggtaagtcatacttacgcaagttttcagcaatcttctcaacttgcttttgactgacactgtagccccaacgtgattgttgatagcccaaagtccacttttgtggcattggtacacgaccagttaaataagtgtagttagtaataacttccttgagtgagtcaccaccgatgatgtagtagtcaatattgccatcaaccgctgagtagtagtaatagtcattactttccttacctaagtcgatgtggttgcgataagtattgtcaaaaaagataccgtaaggatgaccattttttaatcctaataaaattggaatcgacttatacaaacgggtaaagctctctacttgcggatcaggattgtcagtattccaattatcataagcatagtggcgtttgttcaaatagccggttttatcacccaagccataaaattcttcgtcatctgctagtgacttgaccacttcataataatcggcgtcatgctttcccagtaatttatccacatcatggccttcagattcagccagcttcaaatgttcctcatccatctgtcggtcaattggggttcttttcccccgataatctacgaccaatggattgccttgttcatcaaagacgtcaattttttcatcatcataagcttttactatcaacttagccgtagctatttcaatatgatcgcctttatttttaactgtaaaatcagttttaatttctttatcgccttcgatagcataagaattgctagcattacctcgatcttgaaagaatcgcataatttccggtgttaacacggtcaaaatcattggtccattctcatagtttaaggtaattttttgtccatctttagtaaaatcagtaagttgattaatcataatttacctctaaaaaatcaaaagttatgtattcgctttcaattttaacacaataagctaatcaattgggtcataccagaaaaaacaccttcagaaatttttgtatttaaatacaaaaaaactgccttacggcagttttatttaatttattccattggaaaaatcttatctggattcaaaacataatttggatcaaaaacatgcttgatctttctcaaaagttcagtgtaatcatgaccatagaaatcctcaaaccaatctttgcaggcataaccaataccatgctcgccagacatatttccatccaaagctttagctgtcttataaagttcggtaatcacataatgactcttttgctcaaactcttcgtcactcattgcatctgagcaaagataaatatgtaaattaccatcgccggcatgaccaaagttaggaattcgcataccaacctcttgttccaattcatcaactctatgcaaaacatcaggaatatgattaattggcacacaaatatcaacttcatccatctttggcgtagacttttgaatagccaaaagcaatgcttcccgacaagtccaaatcttctttgcttcctctgaattagcatctaaaattaccgcatcagctgctttaaacttcttcgttgctgcaagggcaagctttaattccgcatccaattcctctttagttaaagaatcaagccctagaataatgaagccatcgccatttgcaatcgggaatttttcatcgtaatacttttcccagagactaatgacttttctacccataaattcaacggttgttggcactacaccagaagccaaaattgctggtactgatttaattgctttatccaaattaggaaacggaataattgcattgatcgattgtttaggacgtggatataaacgcatggtaacttcagttactacacctaaagtcccttctgagccaatgatcaggtcttttaacgaataacctgatgaggacttaactgccttagcgccaaatttgtaaagtttaccatcagttaaaacaaccttcaattcgcggatatgttctcgagtaacgccatatttaattgctttcaacccaccggcgttagtatccacattaccaccaattgtagcccaatgcattgctggagctggcatataagtaaatggtttattggctaaatattcttcaatatctttcaaccgaatacctgcttgcacagtcatcgttagactttctggctcgtattccaaaaccttattcattttcaccatatccagtgaaatgccaccttcaacggttaaattgccacccattagaccagtcgaattaccacgcggaacgataggaatatgatgatcgcttgcatatttaacaacgttttcgacttcttcattagtttcaggttgaattaccaagtaaggcattgctctaaccgtcttaaattggtcatgatcccaatgaacagttggcttagtaatgaatcgctctggatctgagataaatttactcaaattatctatatctgttgcagttaattttttaaagtccatctttgacacttctttccaaattgaaacatcctatattaactaatgtatccgcttttgtaagcggtgtcaaaaacaagaactgaagatttttttatctaaaaaagcaaatttccatactacctcactttaaaatgcgatagtatcgactttcatttaaataactattacacaaaatatgaaaataaaaaaactgccttacgacagtttctagttaaataaatccgacatcttagttggaatattattgtttttcacaaaatactttttaaaagtaggtaaatctgcattttcttttttcacatacatatcatgtaaagcccaaaatgcagtgattaacaaattaacgcccaagacaattaacataccgattaaaatatatactaagtaaagcattgatctatcccccgctatatcgtcacttgacccagagtcgcatcttcaatgaagtatctgacgaaagcttgattgaagctcatgccctggccgttgtaaacatgccactcttcgcgtttggcacctacagttctaatgattgaaattactgtgcaaattaccaaatatgcgattagcacgttaaaaattattttcattaccagcatgtctacacttcctctctgtactactcaactaatacactaatatttattagtcaatttgtcaacatcttttagtatttacttttttctccccaggtataaaaagccatagatagctggtccgatcactaccgccccagctatagaaactataatcactgcaataaagcgaggcatagcaaaaaattccgagctaaatttcatacaggcccaggccccaaagaaaaaaatcgcccagccaattaaaattgaaattagcatatttaaacctgaaaatttaggtttagagtttttattgttcatcaagttttctctttcataaaaatattgtgccacaaattgaaggtcaataaacaaaagtgacagattcggtcgttttttagacttatttggtaaaaaataagggagattaagtaaaatatggcgcttaatctcccttttgaatcaataattatttgcccataagacctgaaaaagccattcctaaggcagcaccaccacatgcacctgctttagctgatacgggacgagcataactagtaattgcataatgaaacttcatcacatcatgtgacaatttaccctgccagcttaatggatcaagaccaactcgaattaagttgcagacataattagctgattcaccattttctaactcatgctttgcatcaagtaggatttttctttcttctggcttagtatcttcatttactagtaggtcagtaatattacttaatagccattgttttaaatcatctttattttcttgatacatttttatccctctttttcgactttttcattaatatcaggatgcatccctacaaccattttagaatctttcatgttcttcatcgattcatttattttaataaaaaactctgcaagtagcagagctttttacctcattgcagagttacttatacatatacttagcacatgcttttttagaatccataccattacgaatcttcaaagctaattcaatcgatacatccgcaataattgattgtgggtcaatcacattgtaaggatgatctggtgccttttcctgagctaacgacaattctgtacatcccagcaagattacgttgcagccataatcatcatgcattttttgcaagatctggtggtacaatttaccatcaaccattcccttttctttaatatcggaataaatgagcttattaaccatcggttgaatttccggaccacctaattctgcctcacggtgaaccgcatgaatttcatccacatacaaatgatcatagattgacccttcagtcgcaatcaagccaattttcttttcttgtgggtatttttcaataaattgatgcactgctattctcatcatgtgtaaaaatggaatatcagtcaatgcagccaaatcatcataaaaatagtgagcggtattgcatggcatcacatagaagtctggtcccaatttggcttggcccagaacatcgtcacgtaaatcatagaaaaagtttggtttagtatgatctttaatataagccgttctatcaggaatttgtgcatcattaaccaaaatataatttaaataatcttggtccttagctatttttacacggtgattaattaaacgaacgtagctttctgtggcaatagttcccatgccgccaataatactaaagaagtgtttcactattttcacttactttctaaagtgttcttcttgaccttccaactcattaattacctgctgtgcaaccacaatatcagatggatatggggtatttactccgcgaattttttggaaagcgtcagcccccttaccacagattagcacaacatcatctggcgtagccatggcaatcgcatcatgaatggccttcttacgatctaactcaatagtaacgtcgcacttagagtgatctattcctgaatcaatttcttcggcaatactctttggatcttcaaagcctggatcgtctgtagttaaaaatgctttatctgcgtatgcagtcaaactttcactaaaaccgggacgacgtgacacgcctttatcaccaggagctccaacaacaacaataattttaggatcgttgaattcgttacgcataaatctcattaaagccatcattgaggccttattatgagcgtagtcaactacaaccatgccgtgcttctttgttctctcggtttgcatccggcctggaatagtaacatcgcgaatacccttcgcacattgatcatggttaagtccagccaagcctgctccaataattgcggcagtaccatttgactcgttgaaatcacccagcatctttaaagtataatcaccattaattggtaatttacgtgccttatcactagcacaaactaaattgaaccgagtttctttcatatctaattgttcagaagagaatctgaaatcaattggctgcttcaagtctggattttcaaaattatcgcgggcaaacaaataaatactatcggggttggtagtagttgttgcggcagcgtagacttcatcaaagtgtgcagtttcagcgttgataatacatttacgtgagttaacaagcaattgtaatttgcagtgcaaataatctgcaaaattagggtgttcgttaggaccaatatggtctggactaatattcaggaaaaagcctaaatcataagttaaaccgaagacacgatttttcttatatgcttgactagaaacttccattaccaagtgagtcatgccattatcaacagccgttctcatgtctcggaataagtccaaactctctggtgtggtcaagcttgacttaaagctatcttcaggcttaggaccgaccacatcattaactgaagaaatcagagctgtcttaccaccatttgcttgatcaagcatccctttcaaaaagtatgctgatgtagtctttccctttgtaccagtgaaagctacaacaaacaagtcatcttgtggaaaacggaagaaagcagctgacaaaagagccattgccttagaaacatcgcgcacaattaaagcgtgcattccttttccttctggatatggttgttcagctacataacaaatggccccattgtctttagccattgacaaataagttggtctaaagcctgctcccttgcagaagaacaatgtattagtttgaatatcgcgtgagtcataagacacatagtccattttagtagctactgtatcttgcactgcgcttgacttgagcaagtgatgctcttttaagatcaatatacaggtatttaaggaaatactcattaacttttctcctcgttgtatttaaaacatttcagtcaaaattataacacagctagtgtgttggtgacgctttcttcggatcaagtggcaaacgaataataaaactagtccacttttcgtttgattcacagcgaattgtaccatggtgtaaatcaaccacacctttggtgatagataatcccagaccagttccgcctgtcttagtatttcgcgaagtttctacccggtaaaaacgctcaaagattttatttaatgatttcttcggaattggtgccccattattttcaacgcgcaactctacttcacgtttgttgactaaattggctaccaatttaattttagttgcccctgtaccatacttgaaagcattagaaatcaaattattgtaaacgcggaccagcttttccgcatcagccttaatcgttagattctttggccgcgcttcaatctctatttcaatgccatttttttctgcttctaattcaaagccggccgctacctgctccaacattgaataaatatgcaaatcattcagatttaacttagtattggtcgactttaaagtagtatattcaaacagatcgttagccagtgctttcatttgttctgccttagtataggcaatattgacatactttttctgatcttctggcgaagtcactcctgcttttaacaaaccaagataaccaataattgatgttagcggcgttctgatatcgtgcgaaacattagtgatcaattcatccttagattgctcaattgcccgttcttcattaatcgaatttacagtactatcaaccaacgaattaatcgaatccactactcgttgcaattctggtcgtacccgaaaattaatccgatgatcaaaatgaccattagcaatatagtgaagttccaaaataatgtgacgtagctgcatttggtgatagcgtcgaatcaagcgccagtacaaaacaaccaagtcgcccactcccattaagacgatgaatacgttttgccaggaccagagatgatagccacctgcaaaagtgatcgtcttttttagaaagtagattccgttgaccaggctttcatcctgcaaaatagctaagtgaatcagaatgataattgataaatttaataaaaacagaaggacgaccgttacgaccccttctgcaaacaattcgctcttttcggcgccagttagcttgacgcgttcttttttcatcttatgcctcgaccttgtaacctacgccccaaacagtttggatgacatcctcaccatcagtggctttttgaattttatcacgaaggtgtgacacgtgtaccatgacagttttagctgaaacaattgattcttgttgccaaacacgttcaaagatttcatcagctgaaaaaacacggttagggtgactagcaagtaagtataagataccgaattctaaggcagttaattggatagtcttaccatcaatagtcttaacttcatgtgaatcacggttaattaccaatggtcctacttccaaaatatctggtttttcattcttaacttgcttttgacttcttctcaaaagtgaacgtacacgagccattacttcaagtggattgaatggcttagaaacatagtcatcagcaccagtgattaagccttgaatcttgtccatatcaccggttttagcagaaacaataataattggaatatcggagtcttttctaacttccttaattacatcgattcctgacatatttggcatcatcacatccaaaatcatcaaaacgatatctggcgtagtggtcaatttagtaattgcttccttaccactatatgccgcaacaggttcatatccttcatttttaaggtagatacttaatagttctacgatttctttgtcatcatcaacaactaaaattttcacgaggaatgttcccccttcttgtttattattctctgtttttctatctacagtttagcagatatcatatagaatattttacacattttagaaaaatatactgctttcattatcctttttaaacaaaagctaaaaaaatacacgtttctccatcatgaaaaacgtgtattcattctatttactttaccttatcatcatgcaatttagtttcgacataaacgcagacgataaatagcaaagcaaaacagcagatcttaggtgctgttgcataatcaagcatgctagcaaaaccgaataagataccatctggaacaacccaccaggagccgatcgaagaattaaaggtatcactaactgtcgcaaagaatgcaattaaaatcgttaaaacaagtaaaactgaagttaagatcattcccggccgaccaaaatctttaaaaccatgatcccagtagactatcactccaagcagtaccaataagattgataccagccatagactaccctttttcataataaaggccttctttctgcccttatcctaacacgattaagtagcagctgccttgtttaacgcttattgaatttccttcttgccagtgtagagttcatagtagtaacccttttgcttgattaattcatcatggttaccatgttcaataatatgaccatgatcaagtaccaagattaaatctgagttaacaatcgttgacagacggtgagcaataacaaaactagttctaccagtaagcaagttgtccatcccggcttgaaccattttttcagttcgagtatcaatacttgaggtagcttcatcaagaatcattactggctcatcagcaatcattgcccgcgcaattgacaacagctgtatttgcccttgtgaaaggtcgccgccatcaccatcaatcacagtttcataaccgtgatcaaggtcatggataaattcatctgcgtgtgataacttggctgcttgataaacatcgtcatcactggcatctggattaccaaagcggatattgtccataattgtgccagtaaagagatgggtttcctgtaaaacaattgaaagtgattttctcaaatcatcttttttaatgtttttaattggaataccgtcataagtaatcgttcctgaatcaatatcgtagaaacggttaagcatgttagagatggttgtcttacctgcaccggtttcaccaactaaagctaccttcattcccggtttggcattaatggaaatgtcatgcaagatttgatgatctggtacgtagctaaagttaacatgatcaaaaataatatgaccacgaacttgaaccttcttggttgagccatctttttgtggtacattccagtaccacttactgccgacttcatcgtttttcttagaaagagtaactgtaccttggtcagcttctgacttttgatcttccaagttgaaaattctttctgcaccagctaaagccattacaatagagtttaattgttgcgaaatttgggcaattggcatactgaattgcttagataactgtaagaatgaaccaatggcaccaagtgaaagcggagcccaactattaattgcagcagcaccaccaacaaaggcgatcaaaacgtaaagcaagttacccatgttacccataattgggaataaaattgtagcgtaagtgttagccttacctgaggcttgacgcaactcatcattatatttgtcaaagccttccttagattgtggctcatggctgaagaccttgatgaccttcaaaccattaagcatttcttcattataaccattgatttggcccagcttcttttgttggacttggaagaagtgacttgatctaaccgttaagtagcgcacaattccaaatgataaagcaaaaataatgaaggagaacacagtcaattgccaactaagtgaaaacatagcaactactacaaataataaactcaaagctgagttagtaaattgtggaattgactgtgaaatcatctgcatcaaggtatcaatatcgttagtataacgcgacatgatatcaccaaattcattttggtcaaagtatgaaattggcaagctttccatgtgaacaaacatttcgttacgtacacgatattgcactttttgagctaaaacacccatcagcatgttaaaaaggtaattagacaaaaaaccaatcgcatagatcccaaacattaccgcaattgcagtagctagagggccatagttaggaactttttctttagttaaaggcacaatataattattgatcaaacgttcaatgaataacgagccaataacgttgctggcagctgctagcacaatagtgatcatggaaacgatgagcatccatggacttgtactattaaccagtttcaataggcgcaataagattttggttctgctaccctttgtttgatttttacttttttccattgcttgatccaaattgctcacctactttccttgttcttcctggaatttagcgattgaactataaagttcgttagtcttcatcaattcatcgtgggttccgatagcttgaatttgaccatgatccatgacgataatccgatcagcatccttaattgaaacaattctttgtgaaataatgattttagtagtttctggcatatctttagccaaagacgttctaatttgtcgctcagtactggtatcaacagctgaagtggagtcatctaagatcaagatcttcggattcttaagcaaggctctggcaatagtaattctttgcttttgcccaccagaaacgttgttaccaccttgttccaccattgtgtcataaccatctggcatttcacgaataaagccatcagcatgggcgattttagcagcggcaattacttgttcatcggttgcattttcgttaccccacttgaggttatccttaatcgttcctgtgaacagcacattcttttgtaaaaccatcgcaacgttatcacgcaaggtcttcaagtcatatgacttaacgttgtgtcctgcaacccgaacggcaccagaagtaacatcataaagacgcggaatcattgaaaccaaggttgacttcgatgaacctgtttcaccaataatcccgattgtttcacctggcctaatgtgcaaattgatatcttttaaagcatcagccttgtccgcaggttcgtacttaaagctaacgtgatcaaagataatttcaccattggtcaaacgtttcaatggcttcttaggatcttcaattgttggttcttccgtaatcactgaccactggcacctgagataaccaattgcgtagtaatcatagctaaaatgtttaaactaaacaaaactgagtttgaataagtaaacattgaaattaattgaccagtttgtaaactaccgccaaccacttcttttgcaccgaaccagcagattgacagcgttgaaatattcaaaacagctgcaactactaatgcgttcaaagacataatcttttgtgcagtcgcaaacaacttgtaaataaagcctgatgacttcttgaattctttaatctgcggttgttcttggacataggtcttaacttcacgaataccacgtacgttttcacgcacaacctggttcattcggtcataccctctaaaaatcttaggaaagtatggataagctgttttaataatcaaacccaaagcaattgcaaaaaccggtcctaaaactgcaaagattaatgataaacgcggactaataataattgacataataattaaaacgatgaacatcattggtgctctaacagcaattctgatgatcatttgatatgccatttgcacgttgttaacgtcagtagtcaaacgtgtaactaaactggcacttgaaaagtgatcaatattttcaaaagaatagtcctgcatatggtagaacatgtcttggcgcaagtttgcggcaaaaccagcagctgcatgagctgagacataactcgcactagcgcctaaaattagcgaaataacggttaacactaatagcaatagccccattttactaatataggacatatcccccttcataattccgttatcaatcaaaattccgaccaaatatggaatcagcatttcaatgataacttcaccaataacaaacattggtgagagcaaagacaattttttatattgcctaattgatttgctcaatgttttgatcatagagacccacccttctattcttttattcaatctcgcaaataaaaagataaatggatcatctcccaatgtcattaagttaagacattgacaaattatcgacttggacttttaagatcattcatttgcgatttatcgcatttgaatgctcttttttcatgccaaataaacccaaatcttgtttagaaattaggctacacgatataaataatatacagctgatttgggtttgagatttcttttgtcttttcgtcctggtctgatcggaattgtgtaatgactaatttgaataagaatctttttaaagatttcagttgaagaagaaattatatacatagcctggatgacaaaacatgactgtttgaaattgatcgcatattgatacttgcattttttttgtggtacatatgcttgagcatcaatttgactgactgcgttaaacataatcatgtgggcatagatctccatttcaataaatctatcctgcttggaatgaaactgtacgctacctaaagcatatttcaactttttgaatgaagtttcaatgccccagcgcaaatggtagatttctttgatcctttttaagggataatcggctctatttagattagttagaacaacttcccattcttctttgcctgatttaggatcattaattctaaatttacaggcacgaaattttattgtacataactctccaaagtcccagctgccatctttggtatttttagaccgatattttatatattgacggtaatgatggttaaccaaatgaacgttttctgtagccttatgggtttcataataataattagaggtagtcacccagcaagctatatccttatcacactcttgattaggcaactcagctacttccttaaatgcgccatatcccgttttagtacgtatgacataataacagttaggcaggcgattacaattttcaatcatgttaaagccggtataacctcgatccatagtaactatatatggtccgcaatttagctttttaagcatttgaacggcggctttacgttcatccatctttgacttaggctgaaagatgcagtcttgataagtattatttaacaggtcatagagtgcattaacatgaatttggcaatatggctttcctttatgattgagatttccaacgatattctctgatttaggattccagatttgattaaaatcagacccatcaatggcaaatatacgatatttatgatcaaataactggatattaaataaattctgattaaatacagttagaatatgcttaaaacatgcgggtgaaagctgacctttgcgttggacataagcggaagtactgactactttatcgttatttttaatagctttttggccaaaagctctaaacaactcactggtcaaatcttttccttgcatattaatagtagttttaatgactgtagctgcatctaaaaaccgcttcctagtgaaggcatgaggatcatcgataaaatcatgaatatgctttccagtatcattgataatttgatcaagacgatctaaaatatttctgtgaagggctttcataattaacaccagctttctggcaataattttgaaggtttaataatttaatcagagggcgaaaaggtaggttcttttcgcctttattttatgcaaaaaaagaaccaaatcataatgattcggttctacagagattagattcaatttgtcaatgtcttaacttaatgacattggatcatctccatttatcttttttatctatattaagtttaagtatgtgcttatttttacggaaattcaattaacatgcttgcaaaacaggtaaattatttatgttgttgtggccttggtgcaaatgcggaaccaacaatattgtagtgctttctgaataaataacgtacaccataggcagccgccgcgataacgatgtcagctactgctggtaaaactgggttgattacgcgcaatgctgggatttgcaaaatccacatccagacaaacaaaacaactgctatagccaacattcttaagatcagcttaaccaatgaaggacgtttaccttgctgaggcattagccaatcattgtatttaaccatgaagatccccattaaaatacctacactggcaattgtcagaatccccatttgtgaattatacggttggttcttagtttggaataatgcaaggataccacataaaccaacaaaaattgctaaataaagcaatgcgccatcaaccatcaactgccaagttggtgtagccactggctttttcttaggatgaagcatttgttcagccttaattgctggtgaagccaggtaaagcccattggctggttgcccatgacgttgggcaataataatttcactgagcaagccattagtcatcgcaactgcatcagcacgtgacattgaaccttgtttttgcagttctttttctagacgaaaaacatagtcactgttcttgttactcaacttttcacgcaaagcttttggatcttcctgcttaattttttcatcctgagtatcaagctcagcttgcttctttaatttagcttgtttttcagtgttaatttttgtttgatcttgttctctctttgtctcttcagccattcttactcctagacgttaaatctaaattcaataatgtcaccgtcttgaacttcgtaatctttaccttcaagacgcagcttaccagcttctttaaccttttgcatagtttcaagcttgtctaaatcatcaaatgaaacaacttcagctcgaataaaaccacgctcaaagtctgagtgaataacaccagcaacttgtggagctttcatccctttgtggaaagtccaggcacgggtttcaggaccaccggcagtaaagaaagttctaaggcctaagatatgatatgcagcacgaatcaaacgatccaagcctgattcttctacgccttccatctcaaggaattctttcttttcatcatcagccataccagcgatttcttcttcagttgcagcagaaatacctaagcattctgcaccttcgctttcggcatgcttcttaacaatttggtaatacttgtcgctttctggatcagccattgagtcttcagcaatgttagcaacgtagataactggcttggaagttaacaagaacaagcccttaacaatcttttgttcatcttcgttgaagtcgattgaacgagcagcattaccttcttcaagtactggctgcaatttattcaaaacagccatttcagccttggcttccttatcgccttgttgagcaaccttctttaccttattgattctgcggttaacagcatcgaggtccgcaatagcaagttccaagttaatagtattaatatcttcttctggatcaaccttaccagtaactgaggtaatattgtcatcatcaaaggcacgaacaacgtgaacgatggcatcagtttgacggatgttttcaaggaacttgttaccaagaccttcaccttttgaagcacccttaaccaatccagcaatatcggtaaattcaaaagttgtgtgcacaatcttcttagcaggaatcaattcttgaattcttgccaaacgcttgtcaggaacttcaaccattccgacatttggttcaatggtggcaaatggatagttagccatttcggcaccagccttagtaatcgcattaaacaaagttgacttaccaacgtttggtaaaccaacaataccagcagttaatgacatttgttgtcctctttttctaaaatcaattttttatttttacttacttgtctattttatccaaaatttggccgagcgatacgatcttttggcacatattgctctttttttgcattaaccggatcattcgccttagttaatagcttttttagcttccggttaaactcgctgcgcggcatcatgactatgtgcccacaacccatacattttaatttgatatcagcacccatgcgcaggatttcccaatcattagtctgacaagcatgaggctttttcatttgaactgtatcagccaaattataaacaatttctttagccatctaaatcaacacctaacaaatcaagaatgcggttcaattcttcagtcgaagcaaaatcaatcgataaatgacccttacctttttgtgtttccgaaatattaacactagagccaaacttgttagctaattggctttcactagcgcggataaaagcagactttttagcagttttcttgctgcgtggcttcttagcattcagttcattgacaaccgcttcaactttacgaaccggcatcccttccttgactactcgcttagccagcgcatcaatcttttccttatctttcaaacttaaaagcgttctagcttgtcccatcgacagttcaccatgttggagtaaacgcttagtcttgctaggtaaagtgagcaaacgcaaataattagcaatatatggtcgcgacttacccatccgcttcgaaacttcttcttgcgttaagccaagattcttctgcagcatttcataagcttgcgcctcttcaagtggagttaaatcttcacgctgcaagttttctagaactgccacttccatcatttggctttcgttaaacttgcgaataattgctggaatagtcatcttcttagccaatttagaagcacggaaacgacgctcaccagcaatgatctcatatccattaactgattcgcgcacgataattggctggaaaacaccattttccttaatagaatccgacagttcttttaagctcttatcatcaaatctttttctaggctgataaggattcggccgaatatcgcccaaatcgagttcttggacttcttctgcctcttgaacttgaggctcatcctcaaataaggcttcaagaccacgacctaggccgcccttttttcttggctctttacttcttgagtctcttgtcatgagcttttaacacctcttttgctaaatcatcatataccttggcaccacgagattttggtgcatattctgtaattggctgaccataacttggggcctcagctaatttagtaattcgaggaatgatggtcttataaactttcttgctaaagtaggactgcacttctttaaccacttcagcacccaagttagttctggcatcaagcattgttaacaaaacgccttctacgccaagatctttattaaaatgcttttggactaaacgaattgtgttcaaaagttggctaagtccttccatagcataatattcactctgaactggaatcaaaattgaatcagatgcagtaaaagcattaattgaaagttgccctaatgatggcggacagtcaataaaaacaaaatcgtattgatcgctaattgcatctaaagctgactttaagcgtgtctcccgagccatcattgaaattaattccgtttcagcaccggacaagttgattgtggctggaaccatatctagctttggcgttgaagtatggtgaatagtatcttgaataggaatttcgtcaatcaaaacattgtaaatgtcctggtcaatctctgatttttcaattcctaaaccagaggtagcgttaccttgtggatcaatatccacaattaaaacgcgataaccacggtcggcaattgaggctgctaaattaatggtcgtagtggttttacctacgccacctttttggtttgcaaccgaaattacatttaccatattgttcatccttccctattacttccttttcaattcaattgtgatcttataatcatccggatctttattttctgttactttgactttaattcctgagtcttcggctaacttaaccgccttcttaatggtgttaatttgtacctttaagtctttaggaactcggctaacgacccgcttagcttcttttttagccttaggcttagggttaaagtaaacatccacatcttgcacaatctcttcagtttgtttaacgtttaagccttttgcttcaatttctgtcaaaacgcgatcttgatctgcattacttaagccgatcattgcacgaccatgacgagcggtaattttgccagcaatcaaagcttgctgcacattatcatccagcttcaataagcgcaatttgttagccacataagattgagacttacccatatttttagccaaagcagtttgagtcaaatcatttaattccattaaattagtataagcttttgcctcatcaattggatttaagtcttcacgctgtaagttctcaatcaaggctaatgaagcagcttgatcatcactcatatttttgacgatcgcaggaatagtctgccagcccaagcttttagctgcacgataacgtctttcacctgcaataatctcatattgctcgtcatcgccatcttcacgaactacgataggttggagcaagccatccttatcaagtgtttcagctaattctttaattgaatcatcagaaaattcacgccgtggttgatagcggttaggaaaaatcttgctcaattcaagatcttgaacctgtttattcttaggaatttcatcatcatgatgcataaaagaaaataatgacataatatacccctttctgtttaatgaatcggtttgcgccgcggggtgcctgcttgacgtggatactttttaggtgttgctttgactttttgaactaagattagagttcgttcttcttcgctctcaggtagagtcaattcttcttccttaatcagcttaccgcccagcaattcaagagctttttgaccatcatccaattcatcttcggcttttggtcccttgagggcaataaagtaaccatcttttttcaccaaaggcaagcaatattcactcaaaacactcatccgcgcaaccgcacgagcagtaacgagatcgaacttttctcgataaagcttattttgaccaacgtcttcagcgcggccatgaactaattcgacgtctttcaagtctaacttagtaattaagttctttaaaaaagtcaatcgttttgccaaagaatcaacaatggtaatcttcaattctggctgcaaaatcttgagcggaattgatggaaaaccagcaccagcaccaacatcacaaagagtggcaccatctttaaaaacatcgccaaaagtaaacagcggcgtaatactgtcataaaagtgcttaaggtaaacctcatcttcttcggtaattcgtgtcaaattgacatgctcattaacttcgatcaaataattaaaatatattttaaattgttcaatttgttggtcagttaatttaaaattgtgttttgatagttctaaaataaatttttcaggattcatttttcacccgtgaaaccgtgtttcacacctctaaatttaacgcaaaatgcattgattagtaaagatatttcatcttatcaattatgaagtatttttactcaatcgtcaaagttttgccgcccgcaaaatagggtataataaggcgcaaaggagttaaaaatatgattgttactttaattgttttagcttacttagcatataaaacatatttaggctataaaacaggctttacacgctatatcatcggtttaatctgttccgccattgtctttatggttgccattttcatgcaaaatccatttggtaattggctatacacacaatacactggagaaatgattaagactaactccactaacaacgtggaattaatgattgcacgctttgtcgctttctttattgttttcttcgtgggcaaaatgatcatgaagattgtcaaaagctggattcctaacaaaaatccacatgcgactaacttaggcagtattctcgacaatgtcttgggtgctctagcctccctaattgctagttattttgttgtttatgtagttttgtccatgttcaatgcactacaaaatccatggtttatgcagcaaacaattgattctagctttttgaggtttatcatttacaacacaccggggctttcaaacggtgtcttcaataatatctttaatattggcaaaactgtgggataaaatatatcaaaaaagatctgcttgtatcatactgagcagatctttattgatatgttttaactaaattaatactacatttatgaaccaacattcgatatacttattagcgcaggaagttttatgagcggcggctggttctcccccccggaggtgaggcctatgggctacattgatgaaagggttccagccatgtcggtttacgagagtatctccttgatgcttttgttcggtacatttttgttggctttgctgacatatattgaccaccaccaaaaataaaaaacgccgctcaaacatactttggccagttattgagtagcgtttaacgtaaaatttaacatttgaagccgccgctcttaaagcgggctgcttggagtccctaggactcctttttctttagtcattatagcatatttcactaatcaccgaaattatcatattcaatatgttcatcattataaacaaagattgcaccaattcgatcagggttatcatgccaaccctttagtggcttgccagcaaagaataatcgtttgcattcaatttctgcttcaaccgatgttttggtaaaagtagtcacaccagctaaatcagtctttacaggatacccggttctaggatcaatcaaatgatgatactttttaccgttaactactaagtagcgctcatatgtcccactagtaacggctgagcattcaggcaccataactgacgtaatattgtcgcctcgcggctgtttaggatcttgcacaccaattgaccactggccactaattcttttaggcgaatcaccaactaacaagatattaccgcccagattaataattcctgcttcaacgccatatgcacgccacaagtcacgaattcggtcggcaatccaacccttagcaattccacctaggtccagctccatgcccttcattttaagaaaaacagattggtcactgtcatttaaaaccaccttaaatgggtcagttaacagcattctatctttaatttcttcatctttaggaacatgtgcgcctttaaaaccgatatgccaaagcttaacaactggtccaatcagagcattaaagccaaaattctcacggctcttttctactgccaatttaaccaaaccatacacagcactagagacctgtaccggatgttctccagcagcatgattgatatccattacttcagattcatctcgattaacggtaaaaatatcttcgtaatgatcaattaaatcaaatgatttttgcaatagatcacgattttgagtaccaaaaatctgcaatgtaattgaagttcctaaagcatgatgatcaccaaccacctgctctaatgctaaatctttaatcataattatttctcttccaaatataaatcacgcaacgcctcacgtagttctgtcgttacgccaattttttcttgtaaaaagttatcgaaactaccaaaattctgctcaatagcgattaatgaagtatccaaaaaagcatcagaaactgaacctaaaattcgcatattagcgcgaaaacaaagattctcgccctcttcttgcatttttttatctcttttggcccgatagttattaagcatataatttgagtacaaatagtcctgtctaattgtttccatatctacgccaagcagatataacaagactacagttaccaatccagttctgtcttttccttctgaacaatgataaagtacagcacctttttcagtattggccaacagctctaaaattttatgcaagctatgttgagcgtgttctttcaatacatgtgacttgtaacgctcacacatcattctaaagccagcatactgatcttgacgataagttgcgaatacttgggttaagtctttcttaccgcctttggtgttgtcatcaacagaaattggaatacagaaatgctctacgccagggattttgctgtctggacaatggtcacattcagttggtgaacgcaaatcaataatcttagtcaagccataattgagcaaaaactcttgatcatgtctcgttatgttgctaatcttgcccgttcttaataaccgatgcatcttgaccttacgtccctgatagccaacatatccgcctaaatcacgcggattacaaactttttctaatggcaaaatatttggtttcattaatttcatctctttattaagtattttgataaaaaagccggatagtgtccctatccggtaattttactatcacgtggtaagtcacgcaaaattatttgttagcttgttcaacaaatttaataaagttagccatcatagcatctagttgcttaatataatcttcattggtcaaatcgccagtttctttatcaaaattgcttgcagcaccgccaattaagatttcattgcctggcaaaacattggcactcatgtctggtgaaagcaagatttcacgagcatcttcttgcgcacgactagatccttgaataccgtatgaagtaccaacaactgcagccggcttcatcttcatcacattaggaccagcatgtgaacctaaccattcaagcgcactctttaaggcagctggaattgagtgatcatattctggtgtagccaaaattacaccatccgcattcttaacatcctcgatccacttcttagtaacatcatctggctcatcagttctacagaaaggcttaagttgatcgatttctttaacttcaatatcagcttgctcaccataacgcttagcaataaattttgctaaaaaacgattgaaagaaaatggagcgtttgtaccaacaattgctaaaattttcatttaaataagccccctacttagtaagttgtgcataccaatcatcaacttcatcaaagaagtgattcaaaaacttaagtgtacctgcatcggtcaagtcgcctttatcatcaaattgttttggtgccaaacccatcataaattcgtcaccagcaaagacatgagcactaaaaccaggtgcgcccaaaatgctcttcaagcgagtttgcgaacgagacgcaccttgaggcattggtaaagttgacacaataactactggcttatcatggaatgggtgaacagaactagaaagccattcaagtgcactctttaaggcacttgaaaccgagtgttgctgttctggtgaagcgatcaaaaccatatctgcatcagcaatttttttacctaaagctaatacgctagcaggagcatcaacgccttctttatacataggcaagcccttaacagtcgcaaagtcaaaatcatacttatcgcctaagtccttaataatgactttaagtaatttttcgttaaatgagttatcggcattggagcccgataaagctaataccttcataaaaaccacctttcaaaaatcctcttaattatcattatagactaatgtagtttaatttatgtcattttaattttaataacaacaagaaaaaacgccttcgataatgaaggcgccctctactgaatgaaaagcacaaatgattggtgaaatttctatgccaagttatccttaagcgaagcttcttcgtcggcagcaaacattgggttttcttgagtttcgctgagacgattgttaagcatagcatcgtggatttgagcattcaacacattgacgatttgagtttggctgaagcttgcaatctcattaacaatcaatgcagccatacctgtagtagaaatccagttagcaattacgatgtcatgaatcttttgatcatcataatcaacatcaggatattgttccttgaacttttcagttccaagttccatcaaagtgtcagcaatgatcttgctaccaaacttgccatcaacgaacattgctctaaacaagttaacatgagcttgagcaaaatcaatgtatgacaaatccaagtcaattaaaggttcaccaacgtacttttgttgtaaagtatgagttctcaagtcattagagattcttctcaaaacttgattgcgaagatcatccatgttgttaaattctagatacaaaggttgggttgagaagtgtcctgctttagcaatgctacgagcagtcaaaccttcaataccatccttgattgccatcttgtaggctgtatctaaaattttgtctttactaatttctttttttcttgccattttaatgcacctcaatcattgtataaaacatgtgcttttcaatacacttgttttcttttcttcatcactataatatatccaaaaaaataacaattgcaagtcttatacactaacttattaaaaaatattatcatcgcttaaatagcgatgagccgttgtctcctgtaaattgatcataatgtgaagaagccatttcaataactgcttgcttgtccaatccttgtgcagcacaaaacgaaaagaatgcagcagataaaatatagccgcgttcacgatcatctgtcaggttatctgagaacttcatattaatcgaatgatttgcataatccgttgtcaattcaatcgatttattttctggtttactactcattctattgcaacctcttttttgttctaaaacaaataaaattaaaaattcccggatttaaaattgaagtgcaacactaagtgttaaacaaaaaggccatgaagacctaaacttgaagtgacgaaaaatcaagaaaggaagatcttcatgaccaattcaaattctagcatttctaagcactatcatcaattaaccagcgtacaacgtggacaaattcaagcaatgctggattccggcataacttcccgtactgttatcgctcaagaagttggctgccataagtcgacaatcagtcgcgaaatcaaatgcggaagcgtcctgcaaagagacagcagctatttattgtatgagcactattacgctgatactgcacagatttattatgagaagcgtcgcaaaaactgctatcagcgcaatccattgaagcattatgctgtctttttgagaatgctctccagacgctttaaagctaaatttgatgccaccagcatcgatgagttcgttggtgaattcaaaaggactatgccaggctacccttgtcccagcacaccaaccgtctatcgctatattgatcagggcttgctggacataagcaatattgatctgcctatgaagctcaaaagacgcaggaacaagcgtcatcacagccatggcggtcacgctttgcacaagaagcatcttggcaattccattgaacagcgtcctaaggaggttgaagacagaaaagctccgctgcactgggaaggagatctggttaaaggcgtcagacgcaagaatcagcctgctttaatgactttgactgaaagaaccacacgctttgaagtagttatcaagattcctgactatcgggcaagcacatgccaaaggctgcttcaaaaggagattgacagacatcctgcctggtttaaatcaatcacgtttgacaatggctctgagtttgcggatatgaccaagatcaagggctgccagatttactttgctcacccatattctccatgggaaaggggcaccaatgagaactgcaatggtcttttgcgtcaattcttccctaagggcaagagcatgaaagacaagtcaaaagcttatgttcaacaggcaactgatgccattaaccacaaatatcgccgaatcctccaatatcacacagcagaggaactcttcaagcaatatatctcttcataacctaactgttgcacttaatttgacaattcaggaaaattaaaaatttaaaaatttctattataattatattacaaaatcaaaagaattagaaagcgtgtttttatcaatgaaagtttcaacttggcgctcatcatgcacctcaattttaatcgggaaaaaggcctctctttctggcagtatcatcatcggtcgtaatgaagatgctaagactgcttggcctaagcatttagcctttaatccacatcgagataatgtacagaaaaaccattttaaatccaaagacaataagtttgaaatggatttaccaacagctagctactcttattcttcaaccccagaatggacagataagtacggagtgttcgaagaagacggaattaatgaatatcatgtagcaatgagcgccaccgaaagtgcctacgcaaatgaccgagttttagctgttgacccctttgatactgacaaaggaatcttagaagaagcaatggtcaccgtagttttaccttatgttaaatccgcacgtgaaggcgttcagcgcttaggagaaattgtagaaaaatatggtgcagcagaagctgacggaattctctttggcgatcgtgatgaagcctggtacatggaaatcggttctggccatcattgggttgcacaacgaatcccagatgattcctacgctattgtcgccaatcaactagctattcaagaaattgattttgccagtgacgacttcatgtattctcaagacctgcaaaaatttgtctacgacaataaactctggcctaaaaatcagccattcatttggcgtgatatttttggcactcatgacgatagtgacttacactacaacacaccacgagtatggagcggtcaacgtctgcttactccatctgtagcacaagaacccgaaagctttaacctgccatttattcgcaagcctgatgcaccaatttctgcgcaagacgctcaacgcgttttaagcgatcactacaacaacaccgcctatgatttaaccaatcagaaaaacagaaataatgccactttcagacctatctctgtggctactactcaggaatcacacttgcttgagttaaacggtgaaaacatgattcactggctagctatgggtgtggctgcgcaaagtgtttatgtgccattctatcctcaaggcactaaggtaccaaatacctggaaaaatggaaaagaaacctactcaccaaattcagcttactgggtctttaaactggctagcgtcctggttgatcgtaattggggtaagtacggcaccgctttaagcaatacgcaaagtactactaacgaaaaattgcttcaaattagacagcaatatgatcaaaaattagcacaagaaaaggatcaagaacaacaaattaaattagtggatgaagccaatgccaaattagctaaaactgctactgatgcttataaagaattgatcgctaaactaatcaccgaacaaactggtgactcaccgttgcgtttccaaatggatcctaacttataaacaaaaatgcctcaatgaggcattttttcttactattttttcttagtcattaagccgtccatcatttcataaatatggtcggcgtatttttctagccgcggatcatgcgttactagaataacggccttgtcacgctttttcgctaaatctttaaacaattgtcctacttcttccacattttgcgtatctagcgaagcagtcggctcatcggctaacaaaatatctgggttagcatataaggccgtcgcgattgctactcgctgctgttgcccaccagataattcatttggatacttattaaccagcttttcaatccctagctgcttgagtaagccttgcaatttatcttgcgacaaattattttgcttttttactttatcaatcaaagtaaattgctctttaactgtcaaaaatggaactaaattataagcttgtaaaacaaagccaattttattcaagcgtagttctccactttgcttagcagaaaaattactaatgtctcgaccattaatcaaaatttcacctgaagttggtttttgcaaggacccggcgatcgtcaaaaatgtacttttaccggcgcctgaaggccccataattaaaaccacttcacccttattagcctgaaaattgatatctttcaaagctgcaactttagcttcgcctttaccataaactttattaacatcttttaattcaattactgccattttactcaccaattgcctttgctggatcaaccttcaaaattgatctaatcggaatcaaactaccaataatacccatgactagcatccctaacgtaccactaatcataattgctggcgtaaaagtcattggcacagctgctggtaaagttaaatcagttaaccacatcaagataatcgcaattacaacaccaatagctactaaaattatggattgactgatcgttgcaccaactaaagttttacttggaattccttgagcccgcataacggcaaaattatgcattttttgcatagttaaaatatataggaaaacagcaatcacgatcaaagaaataacaaataagaatccaatcatcaattcaaaagttaagttttgagccgtatatcctggaagcttattaataaaggcttgaattgggtatgtcttggcatccttataattgaatttataattgctattctttgaaacaactgcagaagcggctacattaggagcgaccatccgcagttttttccaagttttcattgagccataaacaattggcgcaatattaatcttggcgttatttacaaaaccaacaattttatattttttcttagagccattcagagaaatttgatctccaagcttgtagcctttgtctttgaaactactgtctactgtaatctgattaccattctttgcttttttcccagcaattatatcttgatcttgataaataaactggtcttttttgatgcctaagaattgagctgaaattgagttttttccctttttcttaactacaattcctaattgaccaataattgcttcattcttgccaatttttgcgttttttaaatcgtcttttgtcagaattgactgactcatgctgatattggcatttttatttaaaacaatcttttgcgcattccaattttcaattgcttgtgtattctgacttgctaacccaacagccaaagatgacaacataaaaattaagtagctgatcaaaaagatcatcaaaataatcaagccatagcgcaatttttcatgcttaatttctttcagtgctagaaacataactacatcccctttgctagtatgtccaggctcttcttatagcgcgccaagttcttttcctgattttcgggatctgataagcataagttgataacttcatgactaagtaccatggcactccacaattgtggccccatattcaacaattgtcttgaataaattttgaaattatgtggtatcaagtactcattttgcgacatatgcaatttcatcattggttcatatttactgtattgaactttatcaataaacttaactactcttgcataaaaatgattaggatcaaatttttcattaggactcatcccagcatgaatgtcttcaatagcgatgtgatacatataaacatatgcatcaattaaatcatcaaaatatttataaaatgctcctcgagcaatgttggcattcttaacaatatgtgacaccttagcatctgctaacggataagtgctgaattcttctaacaacaccgcttcaatacgtctacgtttagcagacggtaaatttttaaaagtttgcttaaccattttgttttccccttttccaacacaaatgacgacttgtcatcaattacttatatcatagctgattttgacgagttgtcaatacatatacacaaaaaaagaaggcctctgccttccttctctaaactaaaactcgattatagtagtacaacctagcaacaccatcacggacgctaaatttgcttaatgcacaattatttggcgtatctatcttgtccatgtcgccattactcaaataatgagctgccatcattcgaatcaaacgaccatgtgccactactaataccttaccttctggatatttttgatatatttcgtctaaaaagttagcgcaacgtgcttcaaactctccgtagccctcaccatttttggcatatttaacatagtcgcgagtaacttttccccatggatcaacgacatccggatattccttagcaatatcatccatcttcttgccgtcccaatcaccaaaatcaaattccagcaaacgtttgtctaaatttaatttctttttacctttagtaaaaattttcgcagtctctactgctctcttcattggactggaataaacaacatcaaatttattttcatcaaacttagcggcggattttttagcatattcacgaccaaattcattcaagtctgcgtcaacttgtgcgccctgaattcgattatctttattcacgtctgtttgtccatgacgaataaaaactatttccattttttacatcaccttttcttaaaatcatacccttatttaactaatctttccatttctttactgtttttttagcgttttgaaatttaaaaagcttaaaatataaatagataattagaaaggggaaacattatgtcccgcgttacaattgaaagagatggtctcaccttagtaggagaccgcgaagaaccattcggcgaaatctatgacatggctatcctcatgcatggttttaccgctaaccgcaacactgaattattaagacaaattgccgatgatctacgcgacgaaaatgtcgctagcgtccgttttgactttaatggtcatggcgaaagtgacggcaagtttgaagatatgactgtgccaaacgaaatcgctgacggcaaggcaatcttagaatacgttcgcaccgatccacatgtacgtaatattttcttagttggtcattcccaaggcggtgtaattgcatcaatgcttgccggtctttatcctgatgtgattaaaaaagttgtccttttagcaccagctgctcaattaaaagacgatgcacttaaaggtaacacacaaggcgcagtctatgatcctaaccatattcctgatactgttccactagtcggcaataaattaggaatgaaactaggcggattttatctccgaaccgctcaagttttaccgatttacgaggtctctgcccgctttagtggcccagtatcagtcatttatggtactaatgaccaagtagttaaccctaaatatgctaaaaaataccatgatatttatgaaaatagcgaacttcatgccattacggatgtagatcacagattcactggtcaatacaaaaagtcagcatcagatttaactgctcaatttttaaaaccattattttagcgccgagtaaagtcgaactcagtacgaaagacgtaatgatccttagtacttacgtcaggttcaaattgaaattcaaaatcattaaagtcctgcaaatctgtgggattttttatttgcttctcggcaatgtagcgcaccatttcaccacgagccatcttagcgtgaaccccaacggtcttccacttaccattttttagttcctgaaagtcaaccgtaattaattgtcgtccttgactcaaataaggtttaaccaaacgtgtatattgcttggaagccaaatcgataactatattatcttcttgaaataaattttcagcgatatcactgccccagaaataatacaagctataatcacgaaaaccaaccattttagtatttaattctaggcgatatgggcaaacaccatcaaaaggccggagcataccataaaatcctgatagaatccgcaaattcttttgaatatagtcaagtgcaggttgtgtaaataaatccggagccatatattggtattgaattcctgaaaaagccaaaattgcaggggttaatcgttcatccaaattcatattttctagttgcaatatgctttgcttagtcacattttcactagcatgccaaaggtcttttaactgttcatttgaccttgacttaagaaatctttctagaattcgtgtcttatccaagaactgcggttttgactgaattggaaatgaatcacgatcaattttcataatttttgcaggtgcaataataattttcatttttagattttgttcctttacggtaaacttaaattgtgattaataagtcatgtggtaataagtcaaatgaaaggcgatgatatttgttctttttgatcataaatttgagtatatgaaactaagccttggtaaaggttgattttttaaatgttaaacttttgtttacttttaaatttagaccaatttttgaaattaagacctcggtgtcctgtacagtttgtcatctttgagcaatttaaagataactcgtactaattttcttgcagttaatgtgcaagcacgtttatgcggcgagtagacagcttcatcatacttcttttggtaatattttttgaaaacaggatcatgtaatcttgctagattggcagcttcaatcaagtaatatcttagatatctgtttccagtcctggccattggagtatgttcgttgctgtgatctcccgattgatattgattccaggttaggccggcatacttagccagctgttcttctttatcaaagcgatcgatacttccgatctcagcgataataccagctgtataggttttgccaataccgggaattgattccagaattttgctttctggtaatgcatcaacgatacgatcaattgctttttctagatctttaatagattcattaaagctttggatcatgttgtaatgaacagaaagcactgcatcaattgaatcagtcattactttgcctaagcgatatgaacctctaacagctttcttaattgctttagccaaggtatctggatcggaaaagcgtcctctgcctttaacctgtaagtaagaaattaagtcttcggtaggcatatccgcgatctcatccagagttttactatcggttacaatagacatcattgtagcaccgaaaagaggagtattaatcttatctttatcgacagtgattagtttattaacccgataatataaagcttcaatgaagtgctgtttggtacgagtcagttcttgaactaattcatatctggtacgcgttaaacgctctaaagcaagatagttgtcttgtctggcaatgcttactcgataatgtccaaagcttagatacaaagcaatgtaataagcatcgagaggatcagttttactttcttcaaagactttatgaaacctgctggtttctttggggttaattacatcagtctctacattgagcttttgtaaatcttcgtcattttggaaaaagtaagcaggatgaaaactgtaaatagatgtagcttccatgccaataatgatttgatcatagtgtttattttgagctagatctaaaatttgttttttcagttcactagcaccataaagatcattgacaaagctatcgttaattaagcgtttgttttgatcttctgaatcaagtgcaacgacctgtaaatctttagaactaacatcaataccgacaaataatttcattggaaatggcctcctttctttcaaatttctgatcatagattttgatcttcacatgttaacccctaattacagttcttaagttcaatctcgccagtataagtattcactggttgcttctttgaaagctgcacctaatcccaattgctcaaggactagcaaaaagaagcaatcaatacagcatgtgagttagagcataaaggaactgcctgggtggcagacttataaagcagacaaaactgcaggaggtgataacctagaccagttgaccaaagccaatgacaattagaggctaacatgtgaagatcaaaaagcaaatactaatttgattaattatcacaatatgactaattacaatttatataatacgaggaggaaaaataatgaatcctgattttgcaattgtcttaaattatcaacttaatgataaggctgatgccgactttttagtaaaaacagcccgtaatatcggtgctcgtgcagtgatgactgacaggcaaactgaagatttcaaaacagcttgcgctaagtatactatttttttagctaatccagaaaatagtactgacttaactaaggataacgtcattgataccatggtcaataaccgtaaagctggtaagactacaattattaatgtgcccgttgaagcaggcaagttttctgccgcaactcaagcaatgctggatacgatcaatgattggatgcaccaattcggtcacgccttcaacgaaggaaaaactagtgctttaaccagtagcgatggctttattttagaaaatcgccacgcaaattaccaaaaatatgtcttcttacctagtcctcttcctgacaaaatcgtggtagaaggcctagtcgaagaacctaaccgggtagaatggattgaacatcgaactgatcttgattttaactataaggatcaaaaattaactattaacttagtcaaaccagatgatgagtttgcttggcaagtgttgcgaattcaagcccaccgacctgaagatgacattttagaaacgaaattttagtaaaaaggcgttctttgtagcagaacgcctttttacaaccttatgtaattgctatttctattttcaaaaaaatttattcttgcttaagctttaactactgaaccattatcaaaaaattctctaaaacgacgtgcttctttatccagagtaatttcatcattaacttgcgataacttatagccaacaaaataaggtggcgcttcaaaacgtgtaatatatttagcacaaataccgtcatcattacgcggataaaagaatagattataagaatcgcagcggccattatacatgatatttaacaaatacttggcaccactttgaatccagtcagcccacaagtcaatgctatttttatctaacaagttaatattgagctcagtgtagccttgaacggggtgttcagcaatgttaacttctaccccacttttttcaaaaagggtctcaccttcaaaattattcgggtgaatatatttatagccatcttcatgttcaaagccaactatctgcatatgcgggtgaatcaaggaaccacctgaatgtggaccatagttcttgtaccaaacaattgactcatattggtcactagcctgcactttttcaaaacaagctagcgcaaaatgcatcaacttgcgattatgttcctgcgtataagtactaatatcgccgttatgatcactagattcaattagtacagtctgccaggtatcgcgcaaggtcgggaacttattcttaagccaaatcatgtcatcttccttggcgtaaatatcagttaaattttcaacatcacaaaatgggcaaacgtttttcttcttatccttacgataagattgcggtttgcctttagcaatgctcatttgaaaaacaagtggatcattagtcatatttattcctttttttatttaaaatagtttaaaatctaatgggtaaagttttactataatgtaaaatattttgtagctttactagcataaaaatacttgttatactttgttaaagcaaacgtttattcgaaatttatcaagagacgggttttaataatgcaatctagaacagaaatgagaaagcgaaacaatcgcaacaatctctatcttattattattggcataattgtcgtaattgcaattatttgtggctttgtcattcataatcaaagggtagctgctgaacgtagccagcgtgaatatgcttctacccacttcaaccctaatgtaacaatttatggtgtgcaagtaggcaagcttactgttaacaaggcgactgctaagatcaataaacaagctgataatgtcgtctttttaagaaataaaaagattattgctgaaaaagacgacaaggttcaaactatcagccaagctgaagttaaaaatattttcactaagcagcatactgatttgccaagcaaacaaaaatacgttttcaaatccgccaaaatagatgaagcaaaaaagagtttgcaaaaaatacaaaatgctgtagtcacctataagatcaatggccaggaattcaagctaaaagctgatgacctaattcacgaagttacttacaaaggtggtaaatataaattcaccgatgtaaaaaaactgcatgctaaaatggaagcgatcgatcaagaagtcaaaactctaaagaagagttataaatttactgttcctactggtaacaaagtcaatggcaaaacgattacggtaaaaaacgaaagctatggttggggaatttatgtcaagaaggctgtggctgcagtagaaaatgcttttattaatggtcaagatgttgttggtggtagtaagtatatttatggcgagggttatagtacctatgctcatggttatggcaagagcaatcatggtattggtaaaaactacgtcgttgtctccatcaaaaatcaggaactatgggttgtccgtaaagggaaagttgccgttcacttaactgacgttgtcacaggtactgaaaataagagtaacgctactcctaaaggtgtttggtatatcatgtacaaagaatcacctagcgtattgcgtggttataacgacgatggctctaagtatgcctccaaagtacaatattggatgccatttactttgagcggctgtggcttacatgacgctagctggcgtagcgattggagtaagtcagcctatcttactggtggctcacatggctgtgttaacattcgtccagctgaaattagaagtgtttggaacaacgttttaactaacgatgctgttatcgtatattaaaaaataaagattaatcgcctacttcaattgaagcgggcgatttttttgcgtaaaattaacagaaaagatatagatttttgaaaggatcaaatatgttagtcatcggtattatttgcttggtggttgctgccatttcttactttaaataccttagtgaaaagaacggacaagctaaccaaaaacaagctgaaaacaaaaatgaggcaaaatggcagcgcactttagcaatcattttcctcgttttcggaattttattaatcggttattggattgcattacgctaaaaaagacgtgaattttcacgccttttttaaatataattgattaccacattacccatattagctcttccctttaaaactaaggtaggaccgccgccattgctttttcctttaactattacattaccaaggctaatgcttaattgattatcaatctgccatgataagggaacgtagagatttacatttcccattgaagcagttagattaagcacgactgtatcacctgctgctttagcatcatcaagatagatattggcattaccgaatgaagtttcaagattaattgactgtaaattttgtgaatgaatataacgtgaagaatcgccagccatcttttgattaattacgatattgtcaccatcttcaatcacatcttgaacatgatgatgtgttacttttgtctctgtatcagcatcgtcactatcatcgtcatcattccaatgaaaactcttcttgataacaatttccggatcttttttaaaaagcaagctcaatcccattgaaacaagcaaagcaataaacaaaatcatccaagaggataagaactttttaatgcccaggggacctgcataagtaattactaaaaaagcaattgagaaaacggacaccacaatgctcttatcaagcaagcccttaattaagcaagccacaaaaatgactgtcaaaataattgtccaaacgctaattttgaagcttaataagcctaattgactgatcaccaaaagcgcagctgcagcgattagtcctactccccacaaaattcttgcaaaactgtttttcattataaagaccttctttcatctaagcatgtgcgtaattctttgtagtatcgacgggatgcatatacagttttataagtatcatgaaactgtatcttgcaatctgaaatcgaccgagttaaaccataaatttgatctaaattaataattgtcgatttggaaatccgcatgaaacctgcgcccaaaatattttctaactcatacaatttatgtttaaccaagtatgccttatcttgtgtatgcaaaattacctgcttggcatctgtttcaaaaaacaaaatctcgttcagtggtaagtagtaagaaacattgtttctaaaacattcaatctgatcattgtgttcaataccttgtaatttcttataaagctgctctatttccggagaaatatttttagctttaataatcagttcatcttctacggcatctggatcaatctcaagttttactttcatgtttctcactcccttctgaatctgatatttatattaaaaaatatttcagatagcttttccatagttttgaactaagtggtaaattttggcttctaagtggcaaaaaaaataagacgacctctgtcgtcttattgcttattatcaatgtaaactagtaaaaaatgttatcagtccaaaaataattcctggaaaattagccgtgaatagcggccaatctttcttttcaccaagaattgcataaagtacccagatcgtgcaattaattgcagcaaccaacggctgaaccggattaccataatttccgttcaaattattaataatttgcggaatatatgaaacatacatcagtacagataataccgacccaatacgtccaatagttaaaacagtttttcggtctaatcctttgaattttttcaacaaatcgctcctttgtgcttcattataagaaaagctagagtcgattgcaaaaatcatactttagtggacaccttccattagcacattaattctcttaactaaaaagaacattattaccgcaaaggctacactgaccaaaccaacagccatgaaatattgtacttcagtgccagttgaatagaacttaacaatttgtgcattcactgcttgtccagttgcatcagccatgaaccacatactcatcatttgcgaacgatatgcattaggggccagcttggtcgtaattgataaaccaattggtgaaatcaacatttcagcaatttcaactaagaaccatgaaccaactagccaaaatggactaaccttgcctgctgtaccataaagcatccctggcaaagccatccacatataagatagaccagcaaaaactagccctgctgcaaacttgcctggagctgttggctgctttttccaatgttcccaaagccaaacgaagattggcgttaaaatcataatgaataatgggttaagagactgaaagttggctgctgtaaagtgccaattaccaatatgaagcacggttctttgagcggcaaacagagctaaaactactgagcctgattcttcaatgccccagaagatagctgcagcaaagaacaatggaatgtaagccttaactcgtgaacgctcaaccttagttacttttgaactacgtagcatcatcacaaagtaataaattggcagtgcaattgctaaaatagtcaataaagtaatgacattgtcaacgttcaattgaccaaagccggccattgcagctaatacaagggcaatcaccacgaacccaataactacccacttaataatattaagcaagtcacctctatcaataggatcattaggcgtcaaactttcaggagaaaggtattttttaccgccccaaacatattgcactaagccaaagaacatcccgattgcagctaaagaaaagccggcatggaagttcatttcattaccaaaaatatgaaagccaaaaccttgtgctgcccatggaactaaccaaggtgcaagaaatgatcctaagttaatcccaaagacaaagatgctaaaacccgcatctcttctgcgatcttcaactgaataaagaccaccaaccatgtcagatacatttggctttaataaaccagtaccaaccacaattaaggcaattgaagcatataacgccgttacaccggctggaagtgccaagacaatgtgacctaacatgatcaaaacgccgccataaaagacggtttttcttgaaccccaaacacggtcagacagccagccaccaactagggttgataaataaacaagtgaaccatagattgacatgattgatgcagccgttgtttggtccattcccagaccacctttggtgactgcataatacatgtagaaaagcaggatggcgcgcattccgtagtaactgaagcgctcccacatctcagtaaagaataacgtggacaaaccctttggttgtccgaaaaatgctgtatttgaatcttgtttccccaaataaaaactcccttcttatcatagataagcacaatagaaataattataccacgaaaaaataaggatccactttttacagcaatgtcattaagttaagacattgacaaattgaatctaatctctgtagaaccgaatcattatgatttggttctttttttgcataaaataaaggcgaaaagaacctaccttttcgccctctgattaaattattaaaccttcaaaattattgccagaaagctggtgttaattatgaaagcccttcacagaaatattttagatcgtcttgatcaaattatcaatgatactggaaagcatattcatgattttatcgatgatcctcatgccttcactaggaagcggtttttagatgcagctacagtcattaaaactactattaatatgcaaggaaaagatttgaccagtgagttgtttagagcttttggccaaaaagctattaaaaataacgataaagtagtcagtacttccgcttatgtccaacgcaaaggtcagctttcacccgcatgttttaagcatattctaactgtatttaatcagaatttatttaatatccagttatttgatcataaatatcgtatatttgccattgatgggtctgattttaatcaaatctggaatcctaaatcagagaatatcgttggaaatctcaatcataaaggaaagccatattgccaaattcatgttaatgcactctatgacctgttaaataatacttatcaagactgcatctttcagcctaagtcaaagatggatgaacgtaaagccgccgttcaaatgcttaaaaagctaaattgcggaccatatatagttactatggatcgaggttataccggctttaacatgattgaaaattgtaatcgcctgcctaactgttattatgtcatacgtactaaaacgggatatggcgcatttaaggaagtagctgagttgcctaatcaagagtgtgataaggatatagcttgctgggtgactacctctaattattattatgaaacccataaggctacagaaaacgttcatttggttaaccatcattaccgtcaatatataaaatatcggtctaaaaataccaaagatggcagctgggactttggagagttatgtacaataaaatttcgtgcctgtaaatttagaattaatgatcctaaatcaggcaaagaagaatgggaagttgttctaactaatctaaatagagccgattatcccttaaaaaggatcaaagaaatctaccatttgcgctggggcattgaaacttcattcaaaaagttgaaatatgctttaggtagcgtacagtttcattccaagcaggatagatttattgaaatggagatctatgcccacatgattatgtttaacgcagtcagtcaaattgatgctcaagcatatgtaccacaaaaaaaatgcaagtatcaatatgcgatcaatttcaaacagtcatgttttgtcatccaggctatgtatataatttcttcttcaactgaaatctttaaaaagattcttattcaaattagtcattacacaattccgatcagaccaggacgaaaagacaaaagaaatctcaaacccaaatcagctgtatattatttatatcgtgtagcctaatttctaaacaagatttgggtttatttggcatgaaaaaagagcattcaaatgcgataaatcgcaaatgaatgatcttaaaagtccaagtcgataatttgtcaatgtcttaacttaatgacattgctttttacagtgaatccttatttattaggtaattattgcttcaaattaattgattgccttagcaactgcgttgttaacagccactttttcagcttcgatcaagtcaactttaccttcaataactttaatatccatcttaatttcacgactaagaagtggaatatttacctttggttcaaagaattctttaaattctttaagtctagttggagtatggaagacgcgagtagttactgtgatgaatgttgtaaattccatgtcaccaccgacagtcttatcaagccaatcccaatcttctctaatccagtcccaggctgcttgttgaccatgatggttgctgagcaaaccagcataccagccacgcaagtcttgtggtttaattacgtcagcattttcaaaattatcaacaattaacgcaacttcggccggatcaatcgtactagtaattgcgctacgaagatcaactttgtatgaaggatcagcagttctttgatattccttgattaggttttcgattaggttgtggctaccaaagttctttacttcattgattaaaacatacggacgaacatcagcattcattgcctctaagttgtcttcattagcagtgaaaatctcatgagctgttttaattgagtctttattttcagcgtaaagactggcacttaattcatatggacgaatttgtgcatcttcatcgctttcacctggcttaactttccagcccaaacgagcaacttgaccagcggataacttgtcataaagcttctttaagtccttttcttgagctgattcaggttcaacaaattggcgcaacttagcagcagtagcgtaaagagcattaataactacacttgacttcgagtcagcaaatttagtcaaaagtggcacaacagcagcataagaaatttgtttaccttctgctaaaagacgtaagtcttgcaataattgcaatttggcaattggatcaagttcatcaacatgagccaaaatatcatcaagcaaagtcttgtcatacttaacgataaagtgcgagttgttacctacattaattctaagtgggtgacctgcttcactacgtaaattcttgtagtaacctaagtcgatttccttatcagacataatcttaggtgccttgaagttagcattcaacggaatttgccattgtctaccaacgtctttaccttcaccaacgaagaattgttgttgtgaaagctttaagtgaccatcgctactatcaacatatgcactaactactggataacctggttgctttaaccatgagtgcataatcttgccaatatcaaggtcagttgcggttgaaagagcatcccaaagatcgtcaccagtggcattaccgaacttgtggtggtcgaagtaatacttcaagccttttcttaaggcatcgtcaccaagaagtgaacgaaccataactaacattctagaacccttggcataaacaatggcactgtcgaaggcagagtcaatatctgctgggtcattgatttccatttgaattggttgaacaccgtcagtagcatctctagtcaaagctgcaggtgcttcactggtttggaacatttcccaaatatgccaatcaggttctagaccatcaactgccaagtattccatcatgttagcaaaactttcgttaagccataaattatcccaccatttcatggttactaaatcaccgaaccattggtgagccaattcgtgagtaataactgtagcaaccaatttcttcatttcaaagctagtattgtctggatcaagcagtaaatatgcttcacggtaagttactaacccccagttttccatggcaccagcactgaaatctggcaaagccaattgcaatgattgtggaagtggatacttagtttggtaaaattcttcgtaaaattcaattgcgttcttagcaacacccaaagcaaagtctaattccttaggcttgtgggccttagttgcataaacaccaattaagacgccatccttagtgtgagtagtctttgattgcaaatcaccaaaggcaaaggcaaccaagtaactagacatgcgaacagtttcttcaaagtggtggtagccgtccttgtccacttcaacctcaggcatattggcaagagcaacttcgccatcttcttcatcccacttaagcgcaagactaaaagtagccttagcttctggttcatcaacacatggaaaagcttgacgagcaaaagtagtttcaaattgggtaccaataatttgcttcttcttaccttctaactcgtagtatgaaggataaatacccatcatagtatcagtaagtggtgcactataagcaatttcaattacagccttgctgtttacaccagttgaaattttgatagcttcctctttttcaagtacttcaaaatctacctttttaccatcaaccttaacgctgtcaatggtcatatatttttggttaataaatactggattttcaattacttcaccggtaatcgttgaagtaccattaatttctttttgtttacggtttacgttaatgcgcaaatcatagtgttctggatggaaagtttcataaaaacgtttaactgtcattttttacctcctattaacagctcatttacttttaattctaccaaaataaagaaaaaagcgctcaaaaaaggctatttcttattgattgtaaggatgacgtttcagttctgtaacattgctgtcatattgagcttgtactatagaagcatagtcattaagaaataaataagttttgaaagaattaattaaatttaataaggaatgaatacatcaatgaataaacatgttaaatctactttagtaaaaatcttagctgccttagcacttgcctttgcttgtgttgcagttgcaaatgctttttctaccaatacttcaactactcaaactgttcaagctgcaagaaagctttcaaaagctgaaaaagctgctaagagatggatcgcaatgcgcgaatcaggtggtagctacactgctagaaacggtgtttgttacggcaaataccaattaaacattggctacttacatggtaacctttcacctaagaaccaagaacgtgttgctgataattacgtttacggtcgttacggttcatgggttaacgccaagagattttggttagctcacaactggtactaaaattaaattcctttaattcccaaaagctaaagaaaaccagcttagtccaattgactaaactggtttttgttttactcaaaattatcttgcttgataaaacgataaagtgcaatgactaaaactaagatcgagcacgccattcctacataggccattgttccaatgtggacagcattgtcagcagcttcacgggctacttgattttccattgcatagcccacaacccatttacgcattaataccggcgtcaagacaaaactaactgtactaataattgaagtcactaacgctacattacgcgaatatggttctttaaagaactgtgctaatacgcagaatgctggagcaatcatcaatagcaagatccacataataatccagcgcccagaacttgaattcatcatctgcgcactattagtggcataacgatatgagctccaaagcgatccaccagataaggtattaagcaaactcaagaaataagatccacgttgtccataaacaccaccattattggacagaataccttgaacaagttggaaactatcagttgatccagccgatgaaaaatcgaccgacacaacttgcttcatataagtagctaaaaacatggtaactgagccacctaattctagtgctcttaacatgcttaattttcttgaagctttcagatgaaattccagacttaaaactcgatcaggatggtgactgtgaccaatgataaaaatccctgcaatgacgatcaaggctaagataaccaatccccaccagaatttaatcatggcgaaaaataaggctaaaacaataatcgcaaccgaaatatatggtcggtcagaaaaaatattccaaaagttcaacttaacatgatggtaatttttccttgatgcatttgcgacattttgattaataatcggctgaggattactaatttttctgctgcgaaattcttcacgtgttgttgctcttgtcttagtataatcggtccgtgaacgatctgcgccggcttggccgtgctcttttttcatgcgatattcacgccgcgacatatgtgccataaactgcagcccccttctcaaagcactatagtagcacattatcacttttttgcttgaattaagaatgaaatttcaaagaaaatttagctttgttttgcatgtgctaaaatgaatattaataattgtgctttttttagaaagagataactttttgaataaaactaaatcagcaaaactgccagctggttggcatatggccttttataccttatggctcggttgctttatcactgggatgggctattcaatgacagtgccctttatttcactatttatttcagatttgggtaattattctaaactgcaaatcaatctttattcaggattagcttttgcaatgacttttattgcccaggcaatagtttcaccatattggggcagcctcgctgaccgcaaaggtagaaaactaatgtgtatgcgtgcttctggtgtgatggctttaactattaccctaactggatttgcacccaatgcaatttatattattgtaatgcgttttattcaaggttctttttctggttatattaacaacgccaccgctttaatggcaagtgaaacgccgcatgaacgtagcggctgggtcatgagtcaaatgatgacggccgggactgccggaaatttggttggaccgctattaggtggtgctctctccagcttctttggcaatatgtttggtggcgcctgggggtatcggattccattcttcattaccggtgttttaatgttcatcgtctttttaggtacaacgttcttagttcacgaagactttactccaatttctcgtgaaaagatgaagccgatgggcgaaatcatgaaaagtttgcctagcgtgaaattgattgtggtgatgtttattactaccatgttggtacaatcatcaaccatgtcaattgatccaattgtttcattatacgtaaaatcaatgatgcctcatggcggggatgttgcctttgttgcaggtgttgttgcggcaacgcctggtcttggaacgctaattgcggcatcgcgaattggacacaagatggatgaagttggaccgttacgcgtattgcgaatcggcttagtcgtcggtgcccattgtttgtaccaatggctttgactaattcgccttgggtactagcaggactgcgcttcttattagggattgctagtgcagggatgttgccagccgcacagacggtattaactttaaacacaccaagcgaaagtttcggtcgaatctttagttataaccagtcatttcaagcagttggtgccgtgttaggatcgttaatgggatcgactatttccggtttttcaaattatgcaacggtattctggctaactggatttacgttactgatcaactttgtgcttgttttgatttttgcttggggaatttcttatcggaatagataggttaagcatattcctaaagtatggaatttaaaaatgtaataaaagagctgtaaatatcacaaaaaatatttacccggatttaaaattgaagtgcaacactaagtgttaaacaaaaaggccatgaagacctaaacttgaagtgacgaaaaatcaagaaaggaagatcttcatgaccaattcaaattctagcatttctaagcactatcatcaattaaccagcgtacaacgtggacaaattcaagcaatgctggattccggcataacttcccgtactgttatcgctcaagaagttggctgccataagtcgacaatcagtcgcgaaatcaaacgcggaagcgtcctgcaaagagacagcagctatttattgtatgagcactattacgctgatactgcacagatttattatgagaagcgtcgcaaaaactgctatcagcgcaatccattgaagcattatgctgtctttttgagaatgctctccagacgctttaaagctaaatttgatgccaccagcatcgatgagttcgttggtgaattcaaaaggactatgccaggctacccttgtcccagcacaccaaccgtctatcgctatattgatcagggcttgctggacataagcaatattgatctgcctatgaagctcaaaagacgcaggaacaagcgtcatcacagccatggcggtcacgctttgcacaagaagcatcttggcaattccattgaacagcgtcctaaggaggttgaagacagaaaagctccgctgcactgggaaggagatctggttaaaggcgtcagacgcaagaatcagcctgctttaatgactttgactgaaagaaccacacgctttgaagtagttatcaagattcctgactatcgggcaagcacatgccaaaggctgcttcaaaaggagattgacagacatcctgcctggtttaaatcaatcacgtttgacaatggctctgagtttgcggatatgaccaagatcaagggctgccagatttactttgctcacccatattctccatgggaaaggggcaccaatgagaactgcaatggtcttttgcgtcaattcttccctaagggcaagagcatgaaagacaagtcaaaagcttatgttcaacaggcaactgatgccattaaccacaaatatcgccgaatcctccaatatcacacagcagaggaactcttcaagcaatatatctcttcataacctaactgttgcacttaatttgacaattcaggcaaaaaatatttacagctctttattattttcaattttttacgctaccatcttttcataaatgcgatacatccgattatcataagcgcacattgaaataaccagattatagcccgcgttttctttctgccacttttcaattgcgtcaactgcgatcttagttgcatcttctgcaggatagccatacacacccgtagaaatagctgaaaaaattacgctatgcaatcccgctttctttgccaaagccagtgaattatagtagcaagaagctagcatatgtgcatcactagtcttgccagcataaactgggcctactgtatgaattacatatttcgcaggtaaattatagccatgtgttatccttgcttcacctgttggacaaccatgcaaagtcatgcattcctcaagtaaccgtggaccagctgctctatgaatggcaccatcaacgccgccaccaccaagtaatgaattattagctgcattaacgatcgcgtcggctttcatcttagtaatatcgcctttaataatttttatgtctttcataattatgtccttagaaataaccaacatttctttctaccaccattctaacaccaacaacatcagttaggctcagaaagaatacaaagcatattgttatttttatattacgaacttgaattgatttctatctttagtatcctaatattaattttagcgttataggagcaacgaaatgaaaattttacgacgcagtttatgcatcatttcgatcaccttattttcttttgctttgagcattctcattcctagtgttcaagctagcaaaatagttttagatgatctcatcatatttttatatttaattggaatcgtaattctgggcattctgttgttgtctaacaaatttgattacctatcactcagtctaagcataatcttgctactcgcaactatcattgcttggatcagattcccaatgattagcattatttatactttttttatagcttatctgagtatatgcttactaacaatttttattgctaaaaggattaagaaataagtcactatgttttctaagaaagaactaaaaatcatcaataacgcattaattattatctatttgctttcagtcggcccaacattcagagactgtaaaatattttgtgtaaggatgaataattccttaaatttatttcttaaaacattagaaaaaggagttcctttctcgtatgattggtttgaacaaaaaaacacatacagaaagaagaactccttcatgaatgattttacaaaaaatatagcacaagctctattcaatcaagacaaaataaacgatttattgcgcaaagagctacaacaggctgttaataacttgctagaagctgaattgactgcctttctgggctatgatccctatgccagaaatggctggaatactggcaattctagaaatggtgcttatttccgcaaggttgatacgcagtttggaccaattgaagtgcaagtgcctcgagatcgcaacggccagtttcatcagcacacgctgcctgactacaagcagcactctgatgttttggaaagcacgattatcaagctctactccaaaggcgtaactaccagagaaatcgctgacttgattgagaaaatgtatggcagtcattatagtccagcccaagtatcaaatatttccaagcagatgctccccaaggttgaggcttatcacaagcgcaagctaagcgacaagtttttctgtgtctatttggatgcgacataccttcctttgcgccgagaaacgtttgagcgtgaagcagtctatattgccattggcattaaacctaatggacataaagaagtcattgactactgcattgcgcctagtgagaacattgaagtctggacagagatgcttcaaaacatgaagtccagaggcttgaagcaagttgagctctttctttctgatggtgttgttggcatgaaagcggccttgaccaggacttatcctaaagctcattttcaacgctgcttggttcatgtcatgcgcaatatctgtgctaaagtccgggtggatgaccgcgaaaagatcatgaacgaattcaagcagatacatcaacagacaagccaaaaagaagctgcagctgtcttgcatgaattttatgcaaaatggaataaagcttatagccatgttatcaaaggtttgagggaaattgagcccgatctgctggtcttctacaattatcccaaacaaatcagagcttcaatttattcaaccaacatgattgaatcctttaacaacgtcatcaagcgtaaagctaagcctaaggcagaatttccaactgaacagtcgcttgatgtatttattggcatccaggcaatgagctacaatgaccgctatttcaaccgaattcataaaggctttggtcaggttcaggataccttagaatcctattttgattaaataaatgattaaaaaatcaatttacgagaaagaactatttacacaaaagatttgacagtttcaacattcatcttcggttttactaaatcaaatgatttcacaagtactttctttttaattgcaaatatcattttagtttgtttattcattatcattgctatcagaattgctaaaatcaatttcaggctaaagacacaatattatctactaggcttcatcactcttatttcaataatagaactagcctaccctggactgacattaaatgaacgcattagcaattattttgctatcggcaatattattttaggcttgctaactactaaaatctcaaagaaattagtttaaatataggacacaaaatgaaatatctgaaaacaccaagattaattaacagtattttgattactttacgtcatactgctataaattattgaattcttattactttaaaactacatcaggtattttcaatcattcaataaaaaataagactagcactaagccagtcttattttctattaatcaactattcttggggtgagaattgccatactgttccatcttggctacggtatgagccatcactcatctttgtaaatataaagacaacttttttcgtcctaattgtgtaaccgttttttgattcagttgtatcaactcggcccaaatcagccttaacacctgtttggggtggattatttttcttaatagaatatgcttgtaaaatttctttattaagtttagtcttcttttgctcagagttgttactatttttagcaactaaaatagcatgattctttgtaaaatacagatcaaaccaattacttaagcgattttctgtgttgtctactgttaatgttcgattaacccagtttttaggtaccgttgtttgattattgtagaaaaacattccaccaataactgctacaagtactgtaactactgcaattacggataacgtcattttctttttcatgatacgtttcctcttaaattcagcattaattatttggcactaagcctctcgaaatgagtcttacatttcctgaatacatgctaacccatcggtttctatttgttttaaaattgtgatccatccaggtactgtttctatacaaatagccactgtaggcaccatcattataataaactttagaaggtgttgtgttgagtaagttcattccatctcccctaccccaactactgtatctataaacattagatacatatttatgaagcggaccatttttgattggcccatacactttaacactctttgcttctcggactgtagtttctgaagcctgaacattctaactattggtagttaatactggagctacagttacacctacaagagtagcaaccactaataatattgactttttcatttttatttttcctcgtttaattttgatgttagtactactttcttacgaacagaagcaggtgcaggaatgctctttacatcatagctgtacaaatatcttctatataaggtagtagcactcttaccaactttttcacgcataacttttgaaagatatcctctataaccgttatactcaaaatagtgagtggcaccataatcataacttgaacctaaggtgatccaaattctcctaggtttatagtaatctgctcttagttttgaactcacagttgtttgtgtttcagctgatgcgctaacctgattcgaaactgtaaacaaactaacgccaactaatcctactagtgataatgaaactagttttcttgaaattgatttcatttttatacagataaagtaccttcactctctggccaaatcattattatttcctcctttcgtatcttgattatcccatgaaactctaatattacttctaaagttgcgtatcacaaaactactctttccaattagtcaccctatcttcatatcctagagaaataagcatggcttttacttctttagcttttgctatatttccttcatacaaacatttatagaaactcccacatgccttataaaaaagaaaatgattagtattgttcaaattcagtaagtaatctaaacaatttttaacctgatttccttttaagccataattacgccagcaataaaggtaattgatacaaatacttgctatcctatcttcatatttctctgaatatgaaaccttctcattgtaatgtttcaaaagaaaactaatataattatctgcttgttctgtagaaaaaacaggaatacagttatcgaataatcgcagcatatcaatattttctacccagttatcttttgcattaaattcagcaataattgtacttttgaattcgtcacctaactcatccaattgatttcgtacaattgctactgcaacaactactctgtacttaaatattctgctatcagataatttcattacttcttgcaaacattcttcgattttttctttatttgaaccattaaatgcacttttcagtttgttttcaagttttaattcaattaagtcctcttctgataaaaaatcatctttaatttgttccaaaaactgatctacatcaatatgatgggcaaacaagatcttaaatagactttctgcagaaattccttctattcctcgttcaattttagaataatggcttttatgaattattccttgaatcatttcatcttgcgttagtcctaagtgcattctttcttgtttcaaggcttcaccgatagtcatctttcatccctccaatttaacttcaactatactatctttttaattttctctccatacaaaaacgccttgctcaaaagcaaagcgttttttagcataagcaatatttgcattaacccttatcggcacctgcagtaattccgttaacgtagaacttctgcatgaagacgaacaagatggtaatagggatagcgatgattacacaccccgcaacgaattgtgcgaagtatgcggtcgcattacccttagctgtgtggaccatgttgtaaagtccatatgcaaccgtgtaagtcttagcatttcctgaagttgaaagaataatacctgagaaaatgaagtctgtccatggagcgatgaaagcggtcaaggcggtataaacgatcattggctttgaaagtggtaaaccaatgtgtaagaatacttgccacttagtagcaccgtcgatttcggcagcttcgtcgattgaccgaggaatagtatcaaagaatcccttagcaacgtagaagcctaagccggcaccaccaacgtaaaccaataacaacccgaagaggtttaacatgttaagacccttcaagatgtagtacaaagcaatcattgacatgaagcctggaaacatccctaaaaccaatgcaatttgtaagaatggttttctgaatgcaaagcgaagtcgtgataaaacgtaagcaactgaaatagttaagaaagttgaaattaccattgaaagcaatgaaataactaaagtattaatgatccagttaccaaatggatattgtggattagtaaaaataccaatatagttttgcaatgtgaatttttccggccagaaggtcgaaacgaatccagtatcattgaatgaaaaacttgctaagacgatccagacaatcggtaaaatccatagaatcgctaaaacaattaataggatataccgaaagattaatgagagccgtctttgatttgaatatgacttcatgtctagccctccttaaatgcattagtacgacgatatgcaatcagtgaaacagttgcactaataatgaagattaagatacccaatacggcactggcgttataacgctgttcctgaccgaaggtcaagttatataaccacgttaccagcaagtcagtcgatccggcaccattatacttactgttcattggtgcaccacctgtcagcaagaagataacattgaagttgttgatgttaccaataaattgttggataagtgaaggtgccatcacaaataaaatttgtggaaaagtgattgaacggaaaatttgtgcagcattagcaccatcaatcttagcagcttcaatttgatcttgtggcaagttttgaataatcgctgttgaaaccaacatagaaactggaataccgatccacatgttaacaagaataacggtaattcttgcaactaaaggtgaagcttggttatcaataaagtgaattggtgaactaatccaatgcaagttcatcaagatattgttcaaagcaccttggtagtccaagaactgcgccatcatcaaaagtgaaacgaattgtggtacagcccaaatgataacaaagattgttctccagaatcccttgtgcttgattccttttgattcaatcaaaagagcaagcaaaacaccaaagaagaaagtcgtagcagtagctgctacagcccagattaaagtccagcctaagactgggaagaaagtaccagctaagtcaccactcaaaacattgccaaatgcttggaagcctgtccatgagaaagcaattgggtgttgacgatcatagttggtaaaggccattgaaatcatgaagatcgttggcaaaatcgtaaagaacaagatacccaataatggaataaccatcaaggttgcgtgtaaccgagtatcaagcaaactcttaagttcttcaacgttagttggaatatggtccccatcacgcttcaaaatataattatgtctagttgagcgtaagttgacaatgtatagataaatgattgctacacataagatcaaggccaatacaccgaataacaaaatcaaaactgagtttgatggttgcttggttacataaacgccttgtgcggcatcataaacaacttttttggttttaatagtacctaatgtagctaatgaatttaaagtagggataccactgaggataaaccaaacaataaagataatttctgaaagtaagagtgaaataccttttacccattgtttgtttgccaaggcgttactacccattaagaagaatgataacttggtagcaatgtcaccttttgaccaaacctcgcgatatgttgctttaggagctacatgctttttctttagaaacataacttctccccttcttaggcaaaaaggctggacaatttttatttagcccaacccttgcttatgcttttagcaaattatttcttttcaatgttcttagcgagcttagcaagttgtggcttgtattgtgctggcttaatcttgccgtcgtaagtaccactgataagcggagctgcaccattccagaatgcggccatttgtggaagcttaggttgcaatactgagttacctggcttagccatttcgattacagcttcagcaaccgggtcactcttaacagcacttgagttgacagcgctcttcaatactggaatttgaccagcgttcttatgagcaattaattgtgacttcttgttagtaatgtaagcagctaaatctgaagcagccttagcattcttggtgttagcattaactgcgaagccttcaataccaaggaatgcttccatttgtacgctcttaccaccaacttcaatcttaggatacttagcaactgcgaagttcttacccaagatcttcttgatattagcagcgttccaaggaccgtccaaaatagcttgtgcgttacccttcttcaattggttcaaagcgtttgaagtttgcattacgcccttgttcttcttttgagctgcgtaccacttcaaagcattaataccgttttgtgagttgaaagttgagcccttaaggtcttcaccattcttaccgtaaagtgtagtacctgctgagaacattactggccacattacgtaagcgttagtaaagtcggtagctacaacaccctttgaagttaaagtcttccagtccttaacgtcgttagctgataacttagacttgttgtagtaaatggtttgagcttgttgtgcgtatgggaatgcgtaaaccttgcccttccaagttacaccctttgaagcaacatcgacatagttgtcttggatatccttagttgctgatggtgaaagtgggttaatgtaaccagcttcagccatttgacctaattgatcgttaggaacttcaaagacatcagcagcctttgatgggtccttaccaacgtctgtcttagcgttagctgaaccgttaggactttgaactacacgaaccttaatattcttgttcttcttagtaaagtccttagcaatttgcttgtagtaaggaacttgttcagtatccacccaaagagtcaagttagccttcttgtttgaattactgctacttgatgatgaattacttgagccgtttgaacatgctgctaatgataatgcagcaagaacagcagtactacctaaagccattttcttccaaatcttcatgactttttcctcctaaaaaatcaaaacaataaacaattcttaacaacagtagcttctgctacatatggttgtaagcttaattaataattatctgtactgcgttttcagtaccagattagttaacaatcgccttggtggaatctttatcaaagaagtgagctttgttaacatccaagcccatcttaaccttgtcacctggcttgtgataatcacgtgaatttacaatagcagtaaattcagtaccatcaacttcttggtgaagctgaatagttgcacccaaaagttctgaaacaacaacatttgattcaattactgaatctggccaggtttccataaatgcttcttctgagtgaatgtcttctggacgaataccaaagactaagtctttgtcgttgtagcctttttcttccagcagttttgccttaccttcaggaataccaatattcaagcctttgccatcagaaattcgaccgtccttgtagtgaacattgaagaaattcatttgtggggaaccaataaatccggcaacgaacatgttaactggcttgttgtaaacttcaagtggtgagccgatttgttcaactctaccaacagacattacaacaactctatcagccaaagtcatcgcttcagtctgatcgtgggtaacataaatagttgtagtacccaagtcttggtgaagcttagcaatttcagtacgcattaccacacgcaatttagcatccaagtttgataaaggttcatccatcaagaagataggtgacgcacgaacgattgcacgtcctaatgcaacacgctgtctttgaccaccggacaaagcacctggcttcttatccaagtactcttcaaggcctaacatcttagctgcttttttaaccttttgatcaatttcatctttaggcgtgtgacgcaactttaaaccgaaggccatgttgtcataaatggtcatgtgtggatataatgcgtagttctggaaaaccatcgcaatgtgtctgtcctttggagcaacatcgttcattactttatgatcgatttctaaggtacccttactgatgtcttccaaaccagcaaccattctcaaagtagttgacttaccacagccagatggaccaacgaaaacgatgaattccttatccttgatatgtaagtcaaagtcgttaacagaatatctgtcgttacctgcatattttttgtaaatatggtttaaatcaacctcaaccattgtttcccctactctctttaattatttttcattaaaaactttttcaatttcactcaatttcaactcagcagttgttggaacgatgtaatcagcttctttcaaaagctccttatcaccaattcctacggcaaattgacctgcagccttgattgcttcgactccagctttggcatcttcaaaactgattacttcatcagcctttaaccctgcaatttcttgcgctttgatgtaaatttcaggatctggcttaccatgatgaagtgttgctggatcaacaatgccatcaaattcatccataatacctaatctagttaaaatcttaggagcattcttagaagcagaagcaattaccatctttaagttttgcttcttagcatctgccaataactcagggatcccaggcaaaatgtcctttggcgtcattgtttctacttgttcaacaaatttagcgttcttttcagctgcgaacttttctttttctgcttcagtatatttgtcttcttgaccgccatattgcaagatcaagtttaatgaatccattcttgaaataccgcgtaagctatcgagctgagaatcagtaagtgtaatgcctaattctttagctaaattattccaagcagtcaaatgaaacttagctgaattagttaaaacaccatctaaatcaaacaataaacctttaagcattttgcgtttcaccttctttaagagtaagtttttggtctttaactacaacatctaaatcgtcacctttaagcaaggtaagttttgtttcattatgatcgacataaacttcgattaagcgaccacggtagttaatcttaaagccgtagtgatcccacttgtctggtacaaatgggttaaatttcaattgatcatgatcataacgcatccctgcaaaaccttgaacaattgctaaccatgaaccactcattgaagtgatgtgcaaaccatcaactgtatcgttgttgtagttatcaaggtcaaggcgagcagttctttcgtataattcgaccgccttcttttgcttgccaagttcagcagctaagattgagtggatacatggagaaagtgaactttcatgaacagtcattggttcgtagaagtcgtagtttctttccttttgttctttagtgtattgatcattcaagaagtagattccttgtaaaacatcggcttgcttgatgaatggtgaacgaaggatcttgtcccatgaccagtgttggttgattggacgctgatcttcaatttcgcttactggacgaaggttcttgtcaaggtagtcatcttgttgtaagaagatgccacgttccttgtcttctggtaagtaaatcttgtcaacgatgtcttgccacttcttcttttcttcatcagtaacattaaccctggcttgagcttccttagttgctaatggcaaacgctccaaagtgtacttaagtagccatcttgccatcgtactagtgaaccagttgttgttaacgttgttttcgtattcgtttggaccggttacgccatgcataacgtacttgttacgccacttggaccagtggactctagctgcccagaatcttgctgttccaaccaagacatccattccttcatccttaacgtatgaatcatcgccagtgtatgacgtatattgcttaatcgcaaatggaatatcagcattacggtgaatttcttcaaaggtgatttcccattcattgtgacattcaatcccgttgaaggtaaccattgggaacaatgcacctggtaagccttgttctttagcgttatggtatgcgcctggcaattgatcgtgacggtattgtaaaagtgcccgagtaacactaggatcagtaacacataagtacattggaacaatgtaagcttcagtatcccagtaagtagcaccaccgtatttttcaccggtaaaacctttaggaccaacgttaagacgttcatcttcaccgtaataagtcatgaataattgacaaatgttaaagcggataccttgttgagcggcatcatcaccagcaattacaacatctgatttgtcccagcgcttttgccaaacggcttcatgatcagctaagttttcttcaaaactcttagcttgaagcttggtcatcaattcagctgccttagcatcttgatcatctggtttgacgtcacgactagtaacaacaatgacatctttttcaagatcgtagctttcgccttcatttaactcaactgaaagcttttcatgaagttgggctgcttcagttgaaacatcacccttaactacttcaccattatgacgaagactttgcttaaggaggactgtaaattgtggaaccttgtatgggttagccttagtttcaaccttaatagttcttgcttcagcattttcacctaaaggcatccagaattttgcatcgtagttactgtcttcgttaacaacagttccatcaagtgctgcatcaaagtcgattttagctttaccacttaaaacggtagccttaactttaattaaagctgcttcttttaaggtaatatgtaaaaacctttcgaattcgaatttaaccttagtatccttaccttcataagtaaaacttctagtcagaagaccttggtgcatatcaagtgctaagtagaaatcactaaacttaactttagctaagtcaagtttttcaccattaatcgtaattcccatgttgatgaaacttggtgagttaggaaccttaccaaagtactttggatatccgttcttccaccaaccaacacgcgtcttatcagggaaccaaacaccagcaaggtaagtaccttgtaagctgtcacctgaatagccttcttcaaagtttcctctcatacccatgtaatcgttgccgattgcagtcatactttcttgcaatcttttatcttttggttcgaacttatgggtaacgaccttccaaggatcaatttcaaaaattcgtttcatatattctatctcccgtaatattcgaggttctctcttgtttacgctttcattatcctttagttgaaagcggtttacaatattaaatctgctgttaccgttatcaggattagttaatagaaaaagaaggtagatcttaatctgccttcttttttgcttattaaaagtaacttttaatgaacactcactacaaagccttttggtgccaattgattattctcataatcttgactaaacgtgttctcacaattgatctctactggatgatcggtcgtgttaaagtatgctttaattctttcattcccctcacgatcgacctcaattaacccattctctgttacgtgtaacttaattcgacctttaccgaaagtttcatcatgttgcaaacgaaagtcaatcaattgatgaactcgttgccaaaccgggccgtcttcttttgcccaatccattggtttacgacaatcaggatcgttgccaccagtcatacccatttcagttccataataaatgcatggactacccttttgcataaattcaaaagctaaggcttgcaaagccaaatcttggtctccattagctactgtcaaaattcgggctgtatcgtgtgaatcaagcatgttcatcatggctgcattggtagcatcccgatatttcatcaactggtctgtcaaacgactagttaattcttgtgctgacaacttgtgcttaaagaagtgatcctcaatttgcaaagtatatggataattcattacgccagtaaactcatcaccgttaagccatggacgagctgagtgccaaacttcacctacaatataaaaatctgatttaatatcagtaacgaccttgtggaatttcttccagaagtggtggtcaacttcgttagccacatctagccgccaagcatcaatatcgaagtattttacccaataagtggcaatttctaataagaaatcctgtacttctggattagctgtgttcaactttggcatatgcttttcaaaggcaaaagtatcgaacttaggactaccctcaccctttaatggatcgcggtaaggttcaactggatattcattaatgtggaaccaactagcaaaacgagaacttggaccatttttaacaacatcttgccattgcattgattgatcacccaggtggttgaaaaccgcgtccagcatgaccttcattccgcgggcatgagcttcattaacaactttcgcaaataaatccttgtcgccgaatgccggatcaacttgcaaatagtcaatcgtatcatatttatggttagaactggctttaaaaataggacagaaataaaggccattaacacccagtttcttcaagtaatctagatggtcaagcacgccttgcaggtcaccaccatagaagtcttcgcggccaggatgatcctccggattccacgctttaaccccttggggatcattagacttatcaccgtttgcaaaacgttctggaaagatttggtaccaaacagtatgcttaacccattctggcgttttcaccatatcaatttcatggcaatatggcactttgaaataagaaccatcttccataatggccttgtctacatcactgctaattgcacgatcacctacaactacactagtgccatcactgccaattacttcaaaggtatacttcaaacgatgatatggtgcttcaagcgtaatgccccaatgatcttcacactgccctacgccaattttttccatctcacatgttttagcctgttcaagtggcaaataattatcgcagtagtgaacaattacttttttaacgtcatttttagcactgtgaaaacgcacgcgaacatgacttggatcaactacaaaactatcttcactttcagttcggtgtcttaaagctgctaattgcatatattaattctcctttttcaacacaacacctgcataaggcatcaaagttaatttttcattagttaattgatattctcccgcttttagtgttgcaacagtataaccggctggtatttcaacagttgtcttttgatcactcaatgaaacagctacaatggcactttcatcatgtaaatcacgttgataaacatagctattcttatccgttgaaatcatataatacgttccagtctggaataaggcttcttttttgagttccagcagtttttggtaaaaattgaacatgctggtggtatcgttaatctcgttagctacgcaagcatcatcctgtttaatacctgttatccatggtttaacttcactaaaaccatggttctcagttgcatcccacggcattggaccacgggccggcaatttatgtgtttcactagccatagctaaggccgcatctttgctcaaaactttttctgcatcctttaaccatggcgctacaatttgatcttcgaattgatctgcactagtgaaatgtagattctttaaccctaattcttcaccgtaataaattactggaattccgcgttgcaaatacatcaacatcgccaagctcttagcctgagtttgtgtcttagctacgcgtgtagctaaacgagccatatcatgattattccaataaagagtaggctgcgatacgcctgctaatgtttgttgccaaactacttgattttgtttaaaggcagtcaaatctaatttcttaggctgatattgctctgaaaaacgttgatcacagttagaatcatcatcggtaaagtaccggaaggtaatcacactatccattaagtgattgcgcttagtcgtgtaatcaacagccaagttaacgctagcacttgcagcttcacctaataaaagcgtatctggataatcctgcttaatctgctcacagaaaggccgcatccattcctgcacctgtggtaagttagcgaaaaatggttccgcaacgattggcttgtttatgtccccatctccagttggataattttgtcgcaaatccgccttgccaatatggataaaagcgtctaaacgcaaaccatcaattcccttttttagccaatattcagctacctcaagcatggcgtgacgaacttcaggattcttccagtttaaatcaggcattcgcttatcaaataagtgaaagtatgattgaccggttccagctggatctggctcccaaacgctgccaccaaagaatgacccccaattgttcggccgcttgccgtcatgaccagcaaaaatatagtagtcacgatataggctgtcaggattcttgattgcgtcttggaaccaaggatgttgatcagatgtgtgattcaagaccaaatccatgatgaggtgaattcctgccttgtgcagatccttgattaagttctccatatcttccattgttcccatgtgtggatcgatggcgaagtaatttgaaacgtcgtagccgttgtccacctgtggtgaaacaaacactgggttcagccaaacggcgtttacgcctagatttttcaagtaagggatgcgcttacgaataccgttaaggtcaccgaggccatcgccattgctatcttgaaaagacttaggataaatttgatatataattgcgtgatcgtaccaatgtgccataattaatttcctccacgcatagtgtaacggattaaagaaaccgttttcaacaccatatctactgttatcgatatcaaaaaagcacaactcgcttttgagttgtgccttttcttctattcaattactaacttttagttgtgcttacgtttccgatcaacaccaaagcctaaaagacctgcaattgaagctaatgctaaaccaataatagatgctctgttttgtttttcaccagtttgtggtaatgtcttggcattcttttcagcttgaacagcagtattattactgtttgcgcgcttaccatgaacattgctattgtagctgtgattttcactattcaatcctgcggcctgattattccctgaattatgcttagtctcggtccgaatattttgaccattatttttggctttatgatgatctgctttcttacccgaattatcatcttttccaggtgtcttatcagttggtttattatctgaaggtgtagtattacctccattatcagtcttaacaactggaacagtgattgatgaacttactgaagctgaggttggagcattgtaaccatctttgatcttatatccagctggcacaccgtttttaatggcacttgaaggatcaatagttgtaccttcagtacctggaatagtggttctgccaacttcattaccattttcatcacggtagataatggttacttggccttgttgtggagtaggaggcgtgatttcaccgccaccgtttttagtataagtaatagttacaacagcatccttagtatctgcagttggagttacttcagcaacactatcttgacttggagtaaatccagtaaaggctggagcagtaaaggctggccaagtgctggttgcgtccttgtcaatgataaacttatcgttttcaactttacctaattgccagtcaccgtaaactgttttgacatttggatcagttgaaacagtcttggtgcgaccgaaccatacaacttgagtagaagtatcagtcttacctgttacaggattcttaacgttgattgtacgagttggatgagcgtacatatcactgttttcgcctggcttgtttggattgattgttgggtcggttggctcagtagtcttagtgtaagcaactgttacattagcatttggagtgtcagcattgaccgtctttgcatcaacctttgttgcttcatgcccattaaccgtggacttgtaaccgtcaactggggtgacatcatattcttgccaactaccttcagaggcaccagttgacttccaagaattattatccttagtagcaactgtccattctgtccaagtaatattaccatcttgatccttggtgccagcattttggccttcaccaccacggacaaagtgaacattttgggtaatgatgtcggtagtaccatcagtcttataaatcgtgattgtccgagtgacatccttgttcatatctttgtcggatggattgtatggaactggggtgatgttgtcagactttaagtaagtgatatgaacagcagcaccatttactggttgaccattgttaagtgccgaagcgctagaaacagttgtagtcttagttccattaacatatgaatcataatctgaaatttgtggtgcattcattgagacaaattctggttgaccacctaaaacaaacttgtggttttggatagtgcctgcctgccaattacctgtacccgtaacttcaccagttaccaagtcttcaataccattgcggccaaattctactgattgagtgtcaatcttcttttcagcttcacccggtttagtttggtaaatatcacgagttactgtcttgaacatgtccttgtacttaggatcagttggatttacgcctggagtggttggagtgatgtccttagtaccatgttcaacaagaacttcaattgcacttggagcagtagtgttaactgtttcagctgatggataagtgtaactctttgaaattacccatttttctggaacattactatcaattgtattcttttgagcttctgcacttacaattgctggagtagttgaagtaaattgtcccttaattgcatccttagctgtaaaaatcacattacctttcgcatccttataaacaatgctttgagtaaagttttcaggtgttggagttgcagcttcaacattaattgttgcaggaacatcaagataagtaccatcactaaagttaattcttacagtacccttaacgccatttgcaatattcttagttgaaggctggccattttcagcccaggtcatagtgaatgtcttggcagaatcattggcttgtgctgaatcagatgaattagtgccaccccagccattttcaagactattaacattaatcaaagtcttaaattgatcttgacttaagttagaaatattttgattttgcttgaaagttaatgactgattagtagttgaaccatagaagttgaagtaagtgttcatccaactgtcttgagtagataaaccaatgtagccgaataaatcactgtcatcaaagctatagtttacacgccacttagagttacctggtaggctttcaccagatgaagtttgttccttagagttaggatttgctggatcatagagaatatcaccggtaccatttgtaatatcccaattgctatttggagttaagataccattacctgctttgacccagctatacttaataacatttgcatcaaagctatctgacggatcttgggcattcacatacttatcaccttgtaagttataagtagtaactgtcttgtagtcacttgctgcactacccttaccatcccagtcagttctgtagacaatttgttgaatcttagcgatattaggatcaagttcatgactatcagtggttctgtgaactgaaatagttggtgtgatgaagctcgtcatactttgattgccatagtaggtatgatgctctggatcattaccagttatcataactggagcagtaaccgtttgtgtatccttacctggaacactaactgtaactggaatcttgtagaaccctggtgttgcgtcttgccctggcttcaaagtaatcgtaccagtagttgaatctactgttgcccaagttggaacgttatcacctgctacaaatttagtaccatcaggctttggtacaccatttgttgtaacaactggatcagatgctgtgctccctttttcaacagtaactgtcttataacttggactatattcacctgctggcacagcattaattgcaccatctttggtttgaacgtctaagtaagttgggttaccttgagcatccttatcagtaaaggtaagtctaatagttgcctgagtatcaccagcctttggtgcacttgcccatgaagcagtgtactgaataccggcattatctaagttaaaagtatcaactaaatcattcttttgagcgtcggttaaatcttgacctacagtaaccttaaccgggttagttacatccttagcagtagcaccagcagctttaatcgtcattggattactgtcaacagtagtgtcaccaactttaactgatacagtaccagttaagtcttcacttgcagatggagtagttacaacagttgttggagcatcgcccttccaagtaatgattgcactagtcttatcaactggcgtgctggttaccttaccatcttcaccaacagtgtattgattaattgcactaactgcttgacctgcagtcaaattcattgaattatctgtagtttcatgagctttatcaaatgcacttggagcagttacaacttctagggcaccagtcttagtggggtcagttggatctggaatgatcttgccagtgtgagtagcattgccaacataaactggtacgtgaactgtatccttagtagtatctggatacgttacaacaactggaattgtagtcaagccagttggcgtttcagtcgttggggcaattgttaaccaaccagtattaggatctactgtagcaaatggtgtgttatcaccaacaattttatacttagtaccttctggagccttgctacctgggttgattgttacagcactgccttgtggagttgattcaggatatgaaggatcttctgacttagattcaccttgttttacgttcatcggatcatatgaaggttggtaaacatcagcatcagggttagtgatatttaatggaatattagcaaaatcaacggtaccgtcttggtaggttacctttgcccaagctgacttatcgctagtcttcaaattaccagttgggttagttggagcatcttgaccgctcattaaatcttgccattccgttgcgtcagtagctgcattgtaccaatctacatttttaatagcagaaagatctggtgttatggttccatcgctagtccgtaacccagaaataccgtccttggcagttaagtcatttaaggtttgtttagtattaccatcaatagtcttgactactggttgatattgaccagaatcagttggcttagctacttcttctaaagaactacccattgcaactctttgtggagtccaccagttgaagttattcaagagtcggtttaagtatggagtttcatattttacaccatcagctggttgaccttgagtaactgttccatcaataaactgaaaactattaaacccagcttggttttgagcaagatttacttgaccgtttgagtgtaaaaatttaatttcaccattcttattttgtcctagagtgttgccggcttgagtaaagccagaaattgcattatcaccccagttgttttgagtttcaatattattgagataccagtaatcagatgcacctgtgcctttatttccttcatcccattgagcaaatggcaatttaccacctgcactagtaatagttacattattatttttattttcaagacgaagtaaagtacctgtttgatttccggtacgctggaaatttacatacttagggttggtaatagtaacatggttatagctatcaccagttccaccaccccacatagttaccaagccatatttaggagtattagtgaagaaccctttcgtaactgaatttagaactggctgagcattatcttgtaagtcaagcgtcgcaccttcatggacattcaaatcccacttagagcttgaaccactgcctgaaccaaatgagattaatggtgtagtagattgattgttatcaccagtacgaacaattattaatttaccttgattatctaaaacattggaatcagcattagtaatattagcagcaaaaccaacacctaatgaaataggagcaaagtggtaaccatcataattagttccaccattggcaccactaccatcattactttgtttagtattgatgttaacaacaccagttttgccaatgtttaagttaccagcccaaatagccattgagtgaccatcagccatgttggcatttaaattaccgtcaacttggacagtaccagtaatagcgctgttgacaagcatccctttaacatctttagattggccatttaaggttacggttgcaccttgttgaacatcaattgctggagcagtatcatttgtttcatcttcaactttggcccgcaaaatattgccaccagcgttttgatcgttgttagtcttagctgaacttacgttaaagatagtgttagaaccatccgcaaaaataatgtgtgcagctgaaacagcacttgaataattagaaacttgattccctgctacattaacggcttcacaagtgatattgttattacccttgaaggttaccgtagtatacggattatcacctatttgttgagccatcgtggtgttataaaaagcaccatttttaacatcagcagttacattttcaaatgtaaccttgttgttagctaaaagatcagttcttatgtcgtttccacccatgtaaattgggctaaaggcaccaccataactagaccatgaattatcataaccatcagcgttaatggttaaattcttgaaagcaatatcccaaggattactatctttttgattgttagtagtaaagctaagataattagcaccaaagttaatagcgtgaccttgaccatcaatatctaatcctccagaaatatttgaaccagttaagttcatctttccagagttaactagtggttgcggacgattaataccgttaacatttgtacccttattagcgacagtaatgtcactagttaatttaattgtaccgatattatagtcgtttaaagcattaactaatccttgccagtccgctacttcttgtgattgagtaccacgtaaattttgttgagtggtagctgcaacttctctaggttgtgcagctaaatttgctccaagctcttttgcaacttcatctttggtcttcttagcactgatattattgtcttgctcatttccaagtgataaaacattaaccttaccacgcatggtgctagttaaatcgttttagttaataaaaaagtccaatcttgttagactcgacttgtaaatagtaataatagaaaagagtctgatctgattgaactgccttaagcttaagcgttttagccaccatttacaagttagttttaaagatttagtgataatttgtcggcactggtatcgtttgtatgcaccggctgagtttactcatcagcgaaatattgatcaaattaaaactacggacagtctgattttggctttacttatctggcaagctaagacaggaattgaatcacaaagaagattctgtgaatgtttcaattgtttatcacactcacgttttaatcggcgttcacgtcagctattgcaattgatttatcagatacggcaagaaatgaataaaaaggttgacctgaatggacatttcttgatcattgacagctttccggtacctgtttgccaaccaattcgcaactatcgtgctaaaatttttcgcggttatgccaacattggttataaggccaccaagaaaatttacttctatggtttcaaagttcatgccattgttagcgatgacggttccattcttgattatgtcgtaacaaaagcatcagttcatgatgccaaggagacagttgaactgctggaaaatgcccatccatctaattactatcttcttggcgacgaaggctatttaggcaaagaactgcatcaacagctaaaacaaatgggttatgaactttggacaccatatcgtaaaaatatgacaggagctaaaaagcacaatgatcatcaattgatggctattcgcagaacaattgaaagcgacttttcgcttctgacctattacaatgccgagaacaatcgagcacgtagtctgataggctttcaaagccggttggaaattgcaattttagcttataatttggcttattgtctagaaagatttaactagcaccacgcgtataattcttatgtttatggacagatcgcgtatttaactaaccgtgttatcgaggaagttcacgaaaaagagaaaattatttctgaaatgcaacacgaagcggaagggttgtctgaatataatctactcttcactatccctgaattcggtgttcgaactgttacttctttgatcggtgaattaggagatattcgtcttttccatagtagtaatgctcttaatgcctatatcaggattgatcttagacattattatgaatcaggtaactttgttgccactgatcatattagtaaacgtggtgatgcgattgcacgtaaaattctttttaaatccatccaaaacattgccgtggcaagtcattttcatcctaatcatattaatgatttctatcagaaaaggaaaagacaatcttctcagccagaaactaagaaaattgccattgccgcgatacaccgtcttctcagaacgatttatcatcttgtaaaatataatcaaccctataattatcaaatagctaaagtataatttaagattgattattactattattgtgcaacccatgaaaaataaatctagttcatgagcttgttttgttatactttaaatttaactttgagccattttaattatttaattacgcatggtgctagttaaatcgttttagttaataaaaaagtccaatcttgttagactcgacttgtaaatagtaataatagaaaagagtctgatctgattgaactgccttaagcttaagcgttttagccaccatttacaagttagttttaaagatttagtgataatttgtcggcactggtatcgtttgtatgcaccggctgagtttactcatcagcgaaatattgatcaaattaaaactacggacagtctgattttggctttacttatctggcaagctaagacaggaattgaatcacaaagaagattctgtgaatgtttcaattgtttatcacactcacgttttaatcggcgttcacgtcagctattgcaattgatttatcagatacggcaagaaatgaataaaaaggttgacctgaatggacatttcttgatcattgacagctttccggtacctgtttgccaaccaattcgcaactatcgtgctaaaatttttcgcggttatgccaacattggttataaggccaccaagaaaatttacttctatggtttcaaagttcatgccattgttagcgatgacggttccattcttgattatgtcgtaacaaaagcatcagttcatgatgccaaggagacagttgaactgctggaaaatgcccatccatctaattactatcttcttggcgacgaaggctatttaggcaaagaactgcatcaacagctaaaacaaatgggttatgaactttggacaccatatcgtaaaaatatgacaggagctaaaaagcacaatgatcatcaattgatggctattcgcagaacaattgaaagcgacttttcgcttctgacctattacaatgccgagaacaatcgagcacgtagtctgataggctttcaaagccggttggaaattgcaattttagcttataatttggcttattgtctagaaagatttaactagcaccacgcgtatttaattaacttttctatccagctaaattccaaggaattcctttaatatccttgactattcgtagaaaaccaaaataagcactgatgttaaattcatcagtacttacaattgtagagtccctttgttcaacccgtattgataacgactgcttacaataataaaattaagaccactagaataacagcttatggttttcgcaactttgatcattcccgtatccgaagtctactagctctcaaatctcatggtaaaaactaagctaaaagaaaaggtcagctcaagcagcttcgctacttaaactaacctcatcaaaatacctcatcagtactgacaaaggggtaaaattgtagagctaatttgattacttgcgcttcttgtttacagcagcaaggccaaacattcccaataaggtggaggcacctaagcccattaatgttaagctattgtcattaccagtttgtggtagttggttatccttagctgtcgttggttgagacgtaatcgtcttcccagtttgcatgttaggaacattaccttctagtttgccagtaacagcatttccattaggagtagtgtttgtaggcgtattagtagctggtgttccttgtccttgatgatcattagttgttggttgaccgccattagttgggatcaaccaacaactaatgatttgattagggttaccatccttgaaggtgtaagatgttggaacactttcaccaggaactaattgataaccatcaggaatgtgaatattaactggaactgtctgaccagacttgccaggattgtccggaagcttatcgcttggtgtctttggatcagttgttgttgtctctggcgttttgggatcagttggatctgtgtccttagtgtaaacaaaagttgtggtgtattggtatacagtatactggccactcgttactccaagagtacgaacaagacgataacctttaattttcttaggttggacttgccatggaccatttgcataccagcctttttgcggattaaccccattatttttttggttaggattatctaggttgaacgcaagcgtatcattattcctaagcacatttccttgctcatcaatgtacctcacagttactggtttgtttggtagcaagtaaacatgtatccccttagcgtaccaattgaaataatcagaattaagatatgtccctgtacttcctatataggagtaaccttgtttttcgtaatggctaatctcctcactcatttttttctcataattaccattgtttaggtcaatccttttgccatagctaccagcaatcgtaaagaatttgtacggtagatttgtttcttctggaacaagtaacaattcagtcctattactatcagaattattttttataaccttcttatacttgaaagttaaataaacatagttaggatcagctaacgaatttcgagtttgaccagtgattttaccctttaaaacaggttcagaaactaatttatatccaggaatattaatggctgcggcttcatagcgtgatgcatccggtgctttcttatcaccagcacggtgttgtggagattcaggggccatccagaaactatctagaacgattgatgctaaaatatgcccgttatctacatcaacatactctactttgattggtgacaatgatgcgtaatctaaattaatgttaatgtcttgcgtagtaatacctttcttaaggcaggcattaccttgtttatcaaaatagaaatacttattcaaaacttctgaattcattaatttataaccggccacagtaaattcttgatccacactatcccctggtcgaattgtggtctgcttgaaaggttgtttgaatacataatgaccattactaatcacttgaattggcttatgtagggtgacatcgcgaaaattcatagtaatgttgtacttactgggcagtggttgttttgctgttgttttatttggaactaatgttgatgaagtttgatgaccaaccgtatttgattcgtcgctaatccgaatattgcttgaatgggcactaacttgtggatcagtcacttgagtcgtggatgtattttgagcagcaactgtcgtattatctgccttggcattaccactaataatgaaggttaagcccaacgaaactgtcaaatcttttgtgtaaatagttctttctcgtaaattgattttttaattatttatttaatcaaagtaggattctaaggtgtcctgaacctgaccaaagcctttatgaattcgattgaaataacggtcattgtagctcattgcctgaataccaataaaagcatcaagcgactgttcagttggaaactctgccttaggcttagctttgcgcttgatcacattgttaaatgattcaatcatgttagtcgaataaattgaagctctgatctgcttgggatagttataaaagaccggcagatctggttctatgtctttcaagcttctgataacatggctgtaaaccttgccccatttggtatagaagtcatgcaggacagctgtggcttcttctttgtttgtctgttgatgcacctgtttgaattcgttcatgatcttttcacgatcgtcgacgcgtactttagcgcagatattacgcatgacatgaactaaacagcgttgaaaatgagcttttggataagtctgagctaaggctgttttcatgccaacaacaccatcagaaagaaaaagctcaacttgctttaagcctcgggatttcatgttttgaagcatatctgtccagacttcaatgttctcgctaggcgcaatgcagtagtcaatgacctccttgtgcccattaggcttgatgccaatggcaatatagactgcttcgcgctcaaatgtttctcggcgcaaaggaaggtatgtcgcatccaaatagacgcagaaaaacttgtcgcttagcttgcgtttgtggtaagcctcaacctttggaatcatctgcttggaaatatttgatacctgagctggactgtaatggctgccatacatcttttcaattagatcggctatttccctggtggtcacgcccttggagtaaagcttgataatcatgctttccaagatatccgagtgctgcttgtagtcaggcagcgtgtgctgatgaaattgaccgttgcgatcccgaggcacttgcacttcaattgggccaaattgcgtatcaactttgcggaaataagcaccatttctagagttgccagtattccagccatttctggcatagggatcatagcccagaaaggcagtcaattcagcttctagcaagttattaacagcctgttgtagttctttgcgcaataaatcatttattttgtctggattgaatagagcttgagcaaaatctttggtaaaatcattcatgaaggagttcttctttctgtatgtgttttttttgttcaaaccaatcatacgagaaaggaactcctttttctaatgtttaaagaaataaatttaaggaatcattcatccttacacaaactattttacagtctcaaatcaagctcaagtcctgtcactattgagctttcttagacgtaattagtttttatatgatctgtttcagtgcaatttgtatgaatcgtggcagttggttaataaagtcattgattacttcatctatcttttcaaaactattctgtttaagctcttttaattctgaaattaagtagaccaatgcatctacgaatctaatatcaggtaaggattcgttcattagatagaataaatctccgattgtcttatcatctgtattttgtctttcctgccaggtcaatagatcataagttattgctgtaactgcgatatagccacattggccatcatagctttgaacttgagatttatctaaagcaagatattgcttagacgtcttaaaatatgtttcaatttgccatctacgaccataaagttggatgatttcttcagggctaagctttgtctgagtagtagctaaaaccaaatgcttgttcttgtttccacggttggagacaaagacgagctttaataaaaagctatgtccatgatattgagcctcaactatgcttgaataaagataatgtttctttttacggatgtttgaagcagccaaacgatcatacaagtctttaacgctatagcggcgatggcgataaatgtaataaatctttgaactcttcttgatcatgccaagtccatctaaaccgatcttctttaaaatccaaaacattcttggagaagaaaaccaagaatcgaataagacgtatttagcttctactcctaatcgtaaggcttgtctaatcaactctacagttacatcattcatctttctctgagcttgatttctccttttaccagaaattgaacgttcatcagcagtaatgggagcagctccaatcatatttttcttggttttggttgacatcaaggcaaagttaaccggcaagaaggtattgccatcgctccagcctaaagttaaaccacgatatccgttcaaatactcatgcttgtcatggtcatagactttagctagcaattcggtctttttagaaaaagaccgagccatcagcgtatcgtcaacgataaaagcaagtcggcgtcttttatcgataaatggttttaagcagccaatgagccgggctgcaatcaagcataatagtttttgccagttgattcttccatcgttaagtacattgcgagcagttctaacggaaaaacgtttgtcatccttagctctgaataaagaaagccgagcaaaatgtactgacatcagccaagagataatcatggttaatgaaacggtggatttacgcttaaaattgacttgtttagttaacttagctagaccaattagattaataaatcccggatttaaaattgaagtgcaacactaagtgttaaacaaaaaggccatgaagacctaaacttgaagtgacgaaaaatcaagaaaggaagatcttcatgaccaattcaaattctagcatttctaagcactatcatcaattaaccagcgtacaacgtggacaaattcaagcaatgctggattccggcataacttcccgtactgttatcgctcaagaagttggctgccataagtcgacaatcagtcgcgaaatcaaacgcggaagcgtcctgcaaagagacagcagctatttattgtatgagcactattacgctgatactgcacagatttattatgagaagcgtcgcaaaaactgctatcagcgcaatccattgaagcattatgctgtctttttgagaatgctctccagacgctttaaagctaaatttgatgccaccagcatcgatgagttcgttggtgaattcaaaaggactatgccaggctacccttgtcccagcacaccaaccgtctatcgctatattgatcagggcttgctggacataagcaatattgatctgcctatgaagctcaaaagacgcaggaacaagcgtcatcacagccatggcggtcacgctttgcacaagaagcatcttggcaattccattgaacagcgtcctaaggaggttgaagacagaaaagctccgctgcactgggaaggagatctggttaaaggcgtcagacgcaagaatcagcctgctttaatgactttgactgaaagaaccacacgctttgaagtagttatcaagattcctgactatcgggcaagcacatgccaaaggctgcttcaaaaggagattgacagacatcctgcctggtttaaatcaatcacgtttgacaatggctctgagtttgcggatatgaccaagatcaagggctgccagatttactttgctcacccatattctccatgggaaaggggcaccaatgagaactgcaatggtcttttgcgtcaattcttccctaagggcaagagcatgaaagacaagtcaaaagcttatgttcaacaggcaactgatgccattaaccacaaatatcgccgaatcctccaatatcacacagcagaggaactcttcaagcaatatatctcttcataacctaactgttgcacttaatttgacaattcaggtagattaataaatgaagaaattaaggatttagtatcattttctgtgtcgatttgttctatactgttcattgcgcaggatctcctttactttttaggtcgacacttaaagtataacgcagagagatcctgcgtttttatttttgataagaaaaagccaagaggcgcggggaaggagcgttaatcttagctttcaagtttcagaaataattttaaaagcagttaaaaagcacctctgagttatcagacgtgctcgttatcttttcgatttatctagttgattggcgccgaatcagcttcggtttaagcattacttcaccttgaggtgaacctgattgggcaatcttttgcagtagcattttagctaacatttcacccatttcaaaaattggttgtttaattgtcgttagctttggattagaaacttgatctaaaaagacaccatcaaaaccaataactccaaagtcttccggaattcgagcgccttcatcttgcaattgccgtacaacacccactgcaattcgatcactggcacagacgaaacaagtatcttttttaaattccttaaaatgttcatgaatcacatcttgcgcagcatgactatgattagaaacccgaaaaatttgtggtatcaactggtgttgttgcaaagtgttgatataaccagcttcacgtgaatattcaaatggctcttttaaatcaattccaataaagataatgtgcttatataaccggtctaaagcatattgagtagccatcttctctgctaactgattatcagaatcaacaaagtcatagccgcggtgattttcaccaaataaaacaaaaggcttatcgagtttatcaaataattcataatctttgtttcgcgccccggtaattaaatagccatctgcatgttccttttcaatttgattaggatccgtaactaattgcatcgcatactgcttagtatttaaaccacgagcaaaaccaaaaagcaagttcatatagtatggctcagtggtatcaatatcttctaaagtgacgaattttaccacgttagtccgattattaactaaagcctgtgcaattgaattgggatggtagtttagtttctccattgctttttctaccattgctcttaattctggcgttacttgctcaggatgattaatcactcttgataccgtcatttttgatacatttgcttctttagcaacatctgataaagtagtcatattattcctattctaagtacatctttctgaatcggtttaaatctttttggctaaagccaagctcttttttgaaaaatccatcaaaactgccccagccttggcgaatagtttccgtaattccacgaatagccggtccctctcccttggtaatattcattttagaaactaggctagcaatttcattatcatcggggaactgtttagccaaagcaaagtcatacaattcattggtcaataaataatcacgcgaaatggtgtcatcatcaacacctaatgcggtcaaaattaacgccgaagtcatgcctgttctatctttgcccgcactacaatgataaactaacgcatcttcttcaggtaattcaatcaattccgcaaaaattttagcaaattcatgttggctatgtgaattaagcaaaacctgttggtaaatttgaccaagccaattgtcacccatatcaggaatatgatggacaaagcgatataacttgttatcgcctttattttgcttgcggttttcagaataaatatgtgcatcaacaaaacggacatttgaccaaagcttgtcaggcgctgaattttgttcatatttagagcgtaaatcaacatctacggtaattcggcgttcaactaacttttcttgatcttccttcgacaaggagctaagtgaatcagaacgatatattttgttccactttacatgttgacccttgtcattttggtagccgccgatgtctctgaaattcagcggtccatccaaagctaatattcgatcatgcttcatttttccttgcctttcctcattaaagtgttaataccgtacttttattatatcattatcagtcatgtgcaaataaccgagcggcacgaattgctctttgccaacctgaataaagtttttcacgttcaactgcactcattttcggctcaaaggcctgtccaatcgtaaaggtatgctttaactcgtcaatatttttccaatagccaacggcaaggccagctaaaaaggctgcacccatgctggttgtttccagcgttttagcgcgttcaatttcaatccctaaaatgtcagcctgaaactgcatcaggtaattgttgttgctagcaccgccatcaacacgtaaagcaggaatttcaatgcctgaatcttgttgcatcgtatcaacaacgtcacgggtttgataagctaatgactgcaaagttgctttaattatatccttgtcagtagttccacgtgtaacaccgaagattgaaccacgagtctccgcatcccaatatggtgcgcctaacccagtgaaggcagggacaacgtaaacctcgttctctgatgtcgactcaagcgctgcttgttcagagtctggcgcatgcttaatcaacttcatcgaatcgcgtagccattgaattgcactaccagccacaaagattgatccttctaaagcataagtaatcttaccattaatgccataaccaatggtcgttaacagattattgttagagtctgttggcttgtcccctgtgttcatcacaataaaggcaccggtgccatatgtgtttttcaccattcctggtttcaaagctagttgaccaaataaggctgcctgttggtcaccggccatcccagcaattggcacttgtccaccaaagaacatatatgacgctgtttcaccataaatctctgaattcgagcgcacctcaggcaacatttgcttaggaatattgagcaaatgcaaaatatcgtcatcccacttgagcgtgtgaatattaaacagcatggtccgtgaagcattagtgtaatcagtcacgtgtttagcaccatcagttaacttccaaactagccaactatcaatcgtgccaaaaagcaactttccctgttcagctttttcttgcgcgccaggtacatgatcaagaatccagcgaatcttagttgcactgaagtatgggtcaataattaagcctgttttttgacgaatttcattactatagccttctttttttaatttttcagctaattctgttgtctgccgtgactgccaaactattgcatgataaattggctcacctgtatccttgtcccaaacaacggtcgtttcacgttggttggtaatgccaattgcggcaatttgattaggccaaatgcccgaattaataaaagcattggcaattgttgtttggaccgccatccagattttattagcgtcatgttcaacccagccaggctctgggaaatattggtgaaattctttttgggcagaagcaacttcacgtccatcatggtcaaaaataattgctctagtagaggtggttccttcatcgattgctaaaatatatttttctgtcacagttattctcttttctacaaaagcgctttcttataatattactgtttttctgatgcagattctagcagttaatgtaatagatacggtataatttttataaggattttttaaggagggcattttaatggaaaaaaatcaaaaaattgcggtaacaattgcgggtaacgatagcgacggcagcgcaggcatgccagcggatctgcattcattctacgcccgcggtgtttatggcatggggctgatgacagccgctgttgctggcaataccaaaggaatttttgcccaacaaattatgtcacttgattttattcaaaagcaatttgatgtactaaacgatgatttcaagattaatgcgactaagacggggatgctcgccaacaaagaaattatcgactgtgttgccgataatcttaaaaaatatgacatgggtaaaatcgtgctggatccggtcatcgttactaagcatggcgctaccctgcttgacgacgatgcttatcaaactttcttagacaaattattgccgctagctgatgtgattacgcctaacttttacgaacaaaaaaaactgaccggcttagaattaaataataaagaagaaattcacgccggggctaaaaaattgcaagcgatgggcgctaaaaatgttctgatgaaagggcgccacgattcagatacgcaaactacagtaaccgatatcttgttaactgaggacggtgaattccacgaatttactaagccattctttaaaaccgaccgcgtaaacggcactggtgatactttatccgccgtgattgcggcagaattagccaagggcaagtcagtgattgacgctgtaaaaattggtaaggactttacctatgacgctatttctcacccaattgatgttggctcaaaatggggcccaattaatcatttggctgcacaagaagaaaacgaataactataaaaaataccgaagctcagatttgaaacttcggtattttcgtgtctattttatcttctttaggcctactatttttcctgaatctagaacacttaccttcgttaattggttattattgtacttatatgatgtaccttcatccgaaagacgtcttgtgggtggtcatttgaccactctttttttacgcaaaaaaacagcaatgaaatcaatcattgctgctaatttgtttactttttctcaattacaaaataatatcctgctgtcaaaatttggacaattccttcaagtgcaatcgcccaatctgcaccgaaatgcgctacgatcagtccacctaaaaatgacccaatcggaatcatcgacgacaaaatagaatcgttaattgtttctactctacctaaaatatgtgggctaaaactctcttgcaccaacacttcaaagttaatattcatcatcacgatccataattcggacgtaaaaaacaaaatcaacaataaaagcggcatccctttgggaacaactggttcaaggacaattgctaaacctgataacgtgagacaaatgacgactaacctttcaattttgcttttatcaaaagttagtcgctgtaccagtacactgccaactaatccacctattgatgaagctaattctaagccaccataactaattgccgatttagtcaaatgttcagtcgcaaaatacggcaaacccacagatgaaatgccgtaaaaaagattagtcactgcaaaaggcatgatcaaccgtgctatcttgtcttcttgtttcaaattttgccagcctttaagcaaatcttgcccataattttctgtgaaatattcattcgacttatttggaagtaataatttcctaggcaatattagtcgtgtataaaaagctagggcgcttgcaaaaaatattgcagaaataattaccgtggagtcaaatgacatccaagtaatcaataacgttgccgctgcattcaaaaacaaatccagcgtcttataagtcatttggaaaacgccatttactttagttagcttcgcttttgaaacgatgactggcaaaattttttcttcagcaggataaatcaaagttgagccaatcgttgaaatgacgtatacccctagcaaaagccaaatcactaaatcgcgccacaacttaacttgaaacagcaacgtcgctataacgctggtcactatctgcattagagttacaagcgtaagcatctttttgatataaacacgatcaatcagcggcccgaagacgaacgacaacatttcaattgatgagtctgcaacaaagattaacgacaagataagcggcgaatgaaagcgtaccttgaaaaaccacaaaatcgccatataaaatagcgaatcggcgatattggttaacactcgtcctgctaataatcgtctgacattgacattttctttttcgattaagttaaacattttcccattccttttcacaacactattaatgccgctgaaagccagggaaaattactattcaattgtagttaaaactcccagaccttcagctaaaaatctgggttgagcctcaagtagcgtttgacgaatgaaagaaaataattcattcgcaaacttaaacctaaaatgtcacgcattttagtcctcgctttctgtgaaaattaagttaattatagcatggatagcgacttatcaataatagtcattctatccttatatttttcgtattttcattcaatttcaaatcatgacttatgataataaccaaattaacttgcgctatttcctgcaatagttttaatagatcactttgtaactcaggatagatatttgccaacggttcatctagtaaaaaacattgcgcgccagtttttaaaacagcagaatataactttactaactgtatttcacctgttgatagttcatttatctttctatctaaaatcttttcaattctaaattgtggcgaatcaaaaacttttgcaaaatacttgcttttataaacctgacttttatcagaatatgatcctaaatagtccctcactgaacaattaggaagtggtatatcttgaaataaacaacttatatttgattctctcagttttcttttattaattaaatcagcatctataccatttatggttatttttccttcctttttcggcgtgtataggccaattattgttctgagcaaagtagattttccaattccatttctgcccctcacaatataaaatcctggagtaacaaaattggcagaaaaatttgaggtgaataagggggttttttcatctaaataaatattaaaatcctgtacttgaatcaaatttattttagaaattatttttttaccatcttgttcattcttcatggttagtaaattgttgattctcatccacgctactttaaacgattcaaatttaaataagatagaaaaaatttcatcaacctgtcccaaaagttgattaaaatattgaaaaataattgaaaaggaaccgattgtcatcttgccggaaatcactgataaaccgccattaataaacaatactaattgaaaaataagttgcaaaacaatctcgctattagacatatgtcaactaccctagactgaagtctagggcttagtggctcgttagcttgcgctaaccagaacaccaacttgcttagatacggacttgacttaccagcaatagtcttttgactattgccgatagaggtcgtctaattaccaaagccttttgagtccgcgagttgctaacggactacagcctttctaggctgctttttttattttaggattctgccacttgcctaatcctttttctaagatgttcactgccgcattccaatcacgaatatggtgcgttcaacagattggacaagtccattcccgatctttaagcgttagtttcttataaccgttttgtcccataatactgccacaagcatgacagcgttgagtagtatatttaggatcaattgttagaaattctttgtcatatagatctgccttataagccagcatgttcaggaagctgcgccaaccaacatcagaaatagcttgagataaggcatgattctttaacaggtttctgcttcttagttcctcggtaactactaaatcgtggtttttgattagtgcagttgagagtacttgtaaaaagtcactacgctgtcttctaatcttgtcgtgcagtttagcaactattagacgctgtttttgatagttttttgctagccgcaaattgcgtccttcttttttagcccggcgctgccggcgagacaagacacgttgagcgtgagccagtttcttttgggttttgcggtaaaagcgtggattagcgaccattgatccgttagatgctgtcaagaaattatcaaggttgagatctattccaatttgactctgcgtcttaggcaaggctttaacaaaggcaatatcgctgcctaactgcattgataagtagaactgctcgtcagcggtctttttaatcgtgactgttccaatacgagttggaatatgattaagcaagcgctctttgattagttttctaaagccggcaatgcggacaattcccagcttaggcagtttaacgtgctgagcatcaataaacctagctgtcccgttatcaagaaaagcttctttttgcttaggatattgacagttggtctgatatgaccagtcgctgcgttttttatggaaagttgggattccatgaccaatcttacgatagttgttccaagctttctgatagttttgaatcgcattggcaagagcgagactatcaatttctttaacacgtaaaaagctataagcatcgcggatattcttaggcttagctaataacgagttattaatgactacttcttctgccagcttagtctcataattattaagaatagaaaagacaaaaggcattgcttgatattgtctaacagctaaatagtgcttagcatgataattgcttcgattgcgtcctacataagagttgtatacaaagcgttgcgcatcatagtttagtttaatgattttcttttgcttagaactaggataaaagcgaagcttaacgccaaagtgataggctaaactgctcattcttttcatgtgtttcacctccttctgtagattagatatttatattttacaggaaagccgaacatatgtctctatttttttgaataaaaaaagctgactgctaggtcagcttggccctatccatccccgcattaagatacggggatttccgggcattttcattaaattgagaagaaaatctcgcttagcaacgcctaaaagcgttcttttagtattgctccatctctcagtttcgattttctctcttcgattaccttttatttcaatatatctgcttaaccattcagtaaaaccagaaaagtactcattataagcttctttcaattttaaactaacttcaaaaatcttagatcgcaaaaataaatatatgagactatatgcaggtaacaggatcgctattaacaataaaaaaccagacccagccataaataaatatgtaaaaatcaaaattgaagaaagggcgattgaaataatttgatttattgtttggaataaaaaagtcaacacttcagtagtatcttcagtaattttatctgctgtttgaaccgaattcatctttgtaactgctagcgtatccttcacatacagttctttcattattacatcattaacttccatgtttatttctctaaatcttaaaatctgaattttgttcataaaatatgacaacaaaagtctgataagacttaaagtcgttattaatacaatactacgtacaaaagcagccctatcagccttatatactaaggaatttaacagtattccttctaagtaaacattaaaagtcaaaatgccagtactgataatattcattcctaatagaagccaatattcaattttatactttttatcaattttgctaaaaatcgtatgcatagtgtcacctaactctgactagcagtcaaaaatgttaaaatataatgaatataaaattagataaattttatattcttatttatcctatgtcaatactaaataaattgatttggttttactttcatgctgtatttgatattatgtagttactaactaccaaataactatctatcaactacagaaagagaaaaatatgactgaaaaagcagcaattaacatccgtgttaataaagaaactaagcaaaacgcagagaaagtattaaacaaactaggcatcccgatgtcagtcgcaattgatatgtacttacgacaaattgcattgactgacggcattccctttgatctatcttccaagaaaagaaaaaagaaaaatgatcacgaaacagcaatgatggtcgcagaagctacagctcaatatgaaatcgttaaatccaactgggaggataaattagctgagtttattcctgactggatgaacatgaataagatgactaaagaggagcttgaagcaaggttagctaagcatgcccaagatgcaagagatggtaaaagtgtcgagattagcaaaacttttagcgacctgaataaagaattagaaatttaaatttcatacaagaatatactgtcaaatcaagtcctaacgtatctgtagaacttaaagagatatatagctctatcttgcaattatctcgatctccaaaaactgctcgagattatgtaaaagatcttgaacaaactatgcaagcgttaaattattttccagaaagatatagaaaaactccttcaggaaaataccgacgagttaatttcaaaaaatacgctatattctactttatcgaaaacgatactgtacacattattgatgtcatactagcttcatcaagtacagtattcaaatattaatcctttgccccattctagctattaagctatactagacagaagaaattaaacaaattaagggacaataaaatgagcgataaattaattaaaattgcatacctctacgaagatttaatgaatacttacggtgactcaggcgatgttaaaatcttgagctttttgctaaagcgtgaaggctacgacactcaagtcgacaatatttcacttggcgatgacttcaatgcctttgactatgatttcgtcttcttcggcggtggtcaagactttgaacaaaccgttgtagccaaggatttaccacggcacaaagaaacacttgataaatacatcaacgatgacaaacctatgctctgcatttgtggtggttaccaactaatgggtagttactataagaccaactcaggtgtaacaattcctggcttagacattttgccacttcacactgtcttcaagagcgacaagcgaatgattggtgatacccgttacatgaccgaatggggcgaagttaaggcttttgaaaaccactctggtcaaacttacttcgacaacaaggacaagttgcatcccctcggcgacatgatcgaaggctacggcaacaacccacaagaccacgtcgaaggcctgcgctatcgcaactttattggttcatactcacatggtccactacttaaaaatactaatgtagctaatgccatcatgaaaatgattatcgcttggcaccaagaacgtgttagcgaagccgaaaaagtcacagaataaaaaagacccagtcagaatctctgactgggatttttcattatcaaattaatttaaaacacgtttagcagctgagggataaaagtaggcactgatagcctgctttctcaccccttgactaggagttgcagcgtgaacatattgtccatcaccaacataaataccaacatggtaaggagctgaggcagaaccccagaacaacaagtcgccttttttaagatgacttaatgatacgcgtttacctttagtaacttgaccataggtggttctaggtagtgtctttttagcagcctttttataaacgtattgagctaagcctgaacagtcaaaggctgaaggaccagtagccccataaacgtaactcttaccaacttgttctttagcaagttggactacggcgttacgtttttctgttttgctttgactagctgcttggacagtttgcgtttgaagtggaacattaatgaatgaaattcctgtaaaaaatactgacaaaactgtggcaaacttaactaaactacgtttaaaactcaatttatttctccttaacacttcttatctttcaatgttttctatattaccggagaaatattacagccttgttttaaaatgactactataaaattaagcaatgtaacaaaatctgctatttcttgtaaattttgcttaacttgaaaaacactataattttctatatgcttaatacattaatttaggagttttttattatgaataagatagatagttatgtacgccactttttaatactaatcgcactaattttagggctttcactcgtctcagaactgcgtgaaattattgcctatgactcatctacccttggtatcatctttttaactgctgcaattatttgtacttttgcttcaggaatcacattacaatttcataaactaaattggattacgatcattttaattctgattctttctacgattatgatcttattctggctcaaaacccacacttttggccttattgtcagcatttttatgatttacaatattattgtatttctggtttgtgctattaacctaatttttcaaaatgatgctgaatgattaaatcatatgcttaatcataggtaatacaatcccaattaccactaatccaccattaaacaaaaaacttattaatttcttttcaaaaaagtatttcttcataaaaaaagacctttctattatgaataatcaaatcttcgggctaaaattccgacaattacgaaaacaacaacatatcactttagccaaagcagcagctggtataacttcaagacagtctctaggtaactgggagactggcaaaggcgaattagcatttgagaaagttttactgctactaaaaaaaatcaacgtccagccaatagactttttagagagtagtataagtagttacctcaaacaaactacttcacaaatctctgcagcttatgttaacaaccaagttgataaattattgcattatgctaataagtatcttgacataagccatcgtaatcttacagacagagttagctttttacgagctgctgtggcatgcaattattacatggacctaacgagtatagatctaacaactagttctgataaactacggatcatctcccattttaataaaatcttgaatggagaagaaatctggaattttgaggatatttattttttaggaaatacacaaaatctgatgagtccacgtgacatttatagtttagcctattctttaaattattatcgtcaaaagcacaaaaacgataatagagaatggatcaatgccgtttataatactttgataaacgctgaatttgtacttataaaaacaaatattaaattggctactgatttagacttacttttaagacaaaagtgggatttaccagataattatgctttcgaaaaaattcgacaaaattttatgcatgaactgctaaaatatatttcaacccaagatgaaagtgcaataactcagcaacttcacattcttgaattagaacacctatctgatttaaaaactggttttgaaacagcatatgaacaagtaaataaaatatattttcaataaactctcctcctagttagtaatattatcttatttctaatattgttagcgctttttgccaatattttagcatttttctttttacaaatattagccatgatattttatattcgtaaactaattaagattttttgaggaggatataaagatgaaaaaatcaattaaattagttaatgtactttctgttagtgtactgactttaggacttgtagcacctgtaaccacagtttctgctgatactgctaattctgagaatatcgcagtaaaaacaaacaatgaatcaacacaaagtacagatacatctggcttagaaatctatgatcaatacgttcaagtaaatcctgaaaaaaatcaattcgaattatccaaattaggtgaaaaggttttaccaactactgtatcatcacagattcagagtcaattaaatgctaccaataaagaaattaaggctaataattttattattgaccctgaaaccaaagcaattgtaaaatactcaccttatattaactttgctgctagcgttagtggcgctgcgcgcttaagaagcggatgttatgttcgatggttctggtggggctttagattctactttacttcaaatgcagcagtaacttggtttagagggattttaggtggcgcttctagtggagccaccataggaaacttagtagctgctgcaacgggccatgctatggctgcaactacaatagaagcatttggtatgtacgctgatagtatgtctagagatttgtatgattataataaaaaacaccgtcgtagtaaagtatatatggatctgaatggtgtatttcaatattcatttcatacattctaaaacatttggagaaataacatggggattaaaactttagtatccgtcattttaatcattatagtcattgtactagcctgctcaccattttataaaaaatatcaattattctatttaaacaaagtaggctattgggatatcctaatccaattcctagtaattgcaggtatcaacttcttcatcggtttaaaatatggtctgggtgccctgtttttattgattgttcccgttccactagacattattttcttaatctcaatgatttattcttaccttaaaattagaaaaatgaaacgcaaatagctcttaaaaaacgaagcaaattattgcttcgttttttgattgatcttatttttcttctgtttcggcgttagattcaaagccatcgcagccacgacaaccaacactgatccgacccaatccatcggcatcattactaacccaaagaaaaggacagaaccaactgtagctgaaaatggttcaaaagcatctaataaacttacagttgatggaattacataccgcagcgcgtttgccataatttgaaatggaataatcgttccaattacaataactgccgcagtatacagccaaacttcaggcttattgggaactgcatgaaattgcggatcaattatcaacaaactgattccagcaaaaatcatcccccaacctgttactaccatactagaaacctttttaacaatgttaaccggaatcaaagtataagcagcctcaccaaaagcagacaaaacgccccaaaacagtgcaactggcgtaatggccaaatgattaaattgcccatgcgttgacaataaaaacactcctaaaaaagcacataacgccgctatgatatccaatctacgcataacttgcttgtgcgtgatagctaaatatcccaatacaaaaaatggcccaataaattgcaagattgtcgcaatcgaagcattagccacttgaatacacataaaataaaatagctgcactggcaataatccaaatatgccataggctataataaccaaaacattgtgcttatttttcaacgtagctattggtttttgctttaaaaatcctgaggcaattaataaaactgctcctgaaataatcaaccgaatttgtgttaaccacattggtgtaatcttcggactaatatcaaacaatcctttagcgaataatcctgacacaccccacattacagctgccattgctgctagaaatgtccacaatcttcgtgtttttgctggtaccatctcgttcacctttttctttctcattcacctaataattaaaccacaaaaataaggatacctactgggcatcctcaactttattgatgagtttttttaactttctttttcttaggtgaaatattcaaggccatagctgccagcacaactaaaatcgaaccaatccagtccattggggtcatcaccaaaccaaagcaaataactgaaccaacggttgcagaaaaaggctcaaaagcatctagcaaacttgccgttgatgccttgataaagcgcagcgaattagtcatcaattggaatggaatcagggttccaatcacaatcactgccaccacatctagccatatatgtggcgtattcggaatatgcggcatctgtgggtgcacaatcattaggcaaattcccgctgacagcaatccccaacctgtaacgactaaactagaaactcgcttcaacacactgattggaattaatgtattggtcgcaactccaacagctgaaagcaaaccccagaatagaacgctaggcgttaaagcaaagtgattaaaacgcccatgtgtcgccagcaatactacgccaataaaggcacagatggcagcaagcacatctattcgccgcattacttgcttatgcgttacagctaggtagcccattacaaaaaagggaccaacaaattgtaaaatcgtggcaatcgaagcattagcttgttgtactacaataaagtaaaacaattggactggtaataaaccaaaaatcccatatgcgataatcgtccacgcgtcatgcttatttttcattgtagcgattggcttttgctttaatacggcagctacaattaacaaaataatgcctgaagttaccattctaatctgtgatagccacattggtgtaatctcaggactagtattaaatagactcttagcaaatagacctgatattccccacattacgcaagctaatccagctaaaaaggcccacaggcgccgttgtttttgtgtaaccattctttttaatccccaacttttctaaaactaacatactctatcataacaaaaacgggctagcttgaactagtccgttaattttttattcatcgtttttcttaattgggtttctgctaggcattagctgcatgaatgtagcaacaataattaaaaagccaccaagcatgtccattgggccaaagtccgcatgaagcagtgaaactgacaggatcgttgcaatcagtggctcgagggctccaagcatccctaccgtacttggttcaatatactgcacactagataagtacattgtataagctaacaatgttccaccaataataatataaacaattacccaaacatcaactggtgcaagttttggcattggttgagtgaagtaaattggtaaaaaggcaatgcctgcaaccaacattgctgcgccgattactggaatcggcccatactttttgaataatttcccaggtaatactgtattaatcgcttcagaaaaagccgcaattaagccccagaaacaagcaagcggtgataaagcaagttgatcgaatctgccacctgtagccaagatgaaggttcccacaactgctaccacaattgaaatcgcatcaattcttcgtggccacatcttacttctcaatgaagaatatataattatgaaaactggcgctaaaaattgaatcaccgtcgctgtcggagcattgctgtacttgactgctacaaagtacgataattgtgagctccccattcctaagaaagcaaaaatgatcaacataatgattacttttttatcatgtagcattgccttgacttggtccaagtatttccaacaagcataaatcataagcagggcgcctgaaaaaagcaaacgcagacctacaagccaagcagtatttacattagtgctagaaaataaaaattcaaccgccgtacccgatgcaccccaaaaacaggcaccgacaacagctaaagtcaatcctttataacgctgattcacattcacacatcctttagattaatgtttttcattgtaacatgggctaaaggaaaagttcaatgcttctaaagttgatttaatctatataacgtataacctgacacgctagccaataagccgattgtaaaaagcaaccaagattctggatgaaaggcaattaaaacaagtgaaagaaagcctgctgctaaactagaattgcgttccattcgctttttgccaaaaagcagaccgcacataatgccaaacatagttagcacataaaatgagtcaactaacagtaacaaattctcaataattgctagatcacttggctttacttttacactcaaatcagtaaaaatctgagcacagccaaaaaataccatcacaaatgcagctaagatcgtgataaagctaatcgtacgaaaaactgacttcaccttttgagttggcgtttcatcgataaaggtttttaagaaaaactcgtgatctttttttgctactacagctctgcccgtcttcttgtcataccagttcaatagaccagaaccaattagcataatagcaatcacagcaaactggatgacaattaaacgcatgaaaattggaaaggcatagattaccgtcaataacaaaattactatatagatcagctctgcataaagaaagaaatgcagacgctgtttatttttgaaaatagtttggaatgtttttgaattaggatcttgcataagacttctccccactaaatcttattacgaaaactcaaccagaaatttgccccactgagaatcaagccaataacagtggctacttgcatgcttggctgcatgaaaagcaagatcagtgataaaacaacagttaaaacgctagacgcacgaattaatttacgatttccacctaaaataccgacctccacacaaaagagtaaaacaacatataggccatcaccaatcagccaaacattttcaaagagattggcaaaattaccggtaagcggcttagccaaaatgtcagtccaaagctgacgtgcaaaagcaatacttaaaccgatatttgcccaaaagagcaagaattcaaataagcgaagaaatacgtttttagtaaatctaatactagtcagtgtttcccagaatgtatcgtgttttttaatcactatccttcgatcaagaaaggcaccaattgaataataaatcagaattgcaatcccttgaaatgcaatcaaatgcataaaaactttaaagtcaaacatcaatgtgaatagtaaaactactacataagctaactcaaaatataatacacagcgactaaactttcgctcgctaagccagtgcttcaattctcttttattcatatgatcactaatattgccattcatattttcactctcttttaataattatctaattatgtaaaaattgtataatgatttcaaaattttgtctagtccttttataattgatttagtaaatatttttcgaggtaaattatgaattatcccattttaattactattttgatcttcttgctgtgctttggccgattcatttggatcattactcacgaacgtcgttccttacgcgctggagttagcttagttatcaccttatttagttttttatttttaggtgtagtcattctggttaatatcgctgaccttgatccacattacaaagactggattttgccattatttgtgattgcgctatttgctgtgatggctggaacgattatctttgcattaactttgatcattatgtttttctacgatggcattaaaatcattatcaaagaaggaaaccgctggacaaattatctttctctgggcatggggatttccattatcttcttcctatttttatatcctcttgtgggacgaattagtcatgatagctggttaaagtatccttatatttttctatggctagtcatcatctacttagtcactatcatgatgatgtatactttaacttcttggattaatttaattaattggcacatgccgcacttagactacatcgtagtgttaggcgctggcattatgggaacaaaggtaacaccacttctggcagcaagaatttcccggggaatagaaatttatcacaaaaatcctggctctaagttaatcatgtctggtggccaaggacctggtgaagacattcctgaagcagttgctatggctgaatatgctgaaaaactgggtattaataaaaacgatattattatcgaaaataaatccaaaactacccagcagaacttgcaattctcacatgcactgatgaaaccaaatagtcgcttctgtattgtaaccagctcctaccacgtgtatcgcgctctggttttagctaaacgtcaaggactcaagtgtactggttatggtgccaaaactaagtggtattttactttaaatgcttttgtgcgtgaattcattgcatatctggtaattactaagaaaatgcaattgactatcatcggttttctagcagctatcatgattgctgctgccgcatttcatttttaatttattgcgttaagttgagaaacttagcgttttttattgatttatcttttaatttttttataattatagtcaaatctatagaaagcaaggtgtaactatgaggattcgtaaaaacaacttgtcaaactgtcattagtcaggatgacgagtcctgactttttcaaaaaagcaggttacttatgtcagaaacaaaattcaataaaactcttcttagtgtcagtcatgtggatttttcctaccctaagcgcaatttattcaccgatctaaatttttctattgctaatggtgaacgtgttgctctagttgggcctaatggaattggtaaatctacactaattgacctaattcgtaagcaaatccaaccagatgatggacagattatttgtcacggtgaaattaattatgtacctcaagtcaatgatcaaactgtaattaatgactcaaagagcgctggtgaaaagcgattagctttaattgaaaatactatttggcttcctagttctcttctcttattggacgagccgacagtttacttagatgacacaaatatccagaatttactctacttactcaagaattatgatggagcaattctagtagctagccatgatctggattttatcaaccaactatgtgagagaactattattctgcagccaaataatgcagtttattacccaggaaattacgcacagtatctcgaacaaaaacaattagataaacaagccgtatacaattttaacgaaaagcgagatatattaaagcaacaaattactgaaaaagtctctactttaaagcaaaaaagtactgactataatcattttgctaaaacacaagacaatactggtcgctatccttcgcgaagccatgatcatgtccaaaaaggattaaatagtcggcttaagcgagctgaacgtgaactggctaaacttccagagaaacagcacctatatcaacatcaacttaaacttcctgaatttaaaaagtggccgactaaaatacataattactctatcaaaatagatcaattactcagtccccaaaataagactttattatctaatacacagttaaacttgcaaacagccgatattattggattaatcggccccaacggctgcggtaaaacaacattgctcaaatatttagaacactacattaatcagcagcaatctttgccaccagccagctacattggtttaaatacgactaaacaaaagaaacctgccacagtagcagatttctttcacgagactattttgagcaaaactgaagttaagcgtcttttagttaaaatggatatgtttgtcgatttgactacaagactcacggatttgagtggtggcgaatttgctaaattagcattaatcaagcagctataccttgaacaagaatctattctattacttgatgagccgactaactatcttgatccagaaagtgtgacggccttggcccaaatgctaaaacagtcgcatctcacttgtattattgcatcccacaattgcaaatttttaacccaattttgccaacaaatctataaaattaagcagcaaagactaattgaattgcactaaagcatttctcttaaacacatatttgctaagcatatcctttactatcctcatctatattaatgaagatcacatttggtgctgcagaagtttggtgcgtttctttattatatttaccaccataatactcataacgaggtttccccttgccaaaaggatctattcggcaaagaaagatcacatatgtcgctttgaattctttttccggagagccacctagcccgccatagattatttcttcctgataagcgttggcaacttccagaatgttttctcctggttcttgcgaccctacttgaatgattaacccgtatttattgcgcctcttgtctcgcgcaattacatgtacgattgctttttcatctaagacatttctatttggatcatcaagtgattttgcttcctgaatattgagttcgggaagcattctttgtactgctgtaagaagctgctcattatacttcttcataattcctgcggccatgtgatccaccattgccggtgacatttcattttctaacataaaaaaatcctcatttctaaaaatctgagagttttatccctctattacttattacgcaaaaaaacgcaaaaattttttcggaaatgaagttttttcaattttttagttttcttttctaaaaaatggactgagtagcgatacaagcaggccgtaaataaaataccagcgataaatatctgccaagtcttgattttgaatccacaaaattattgcaattactgtcagtaagccacctaaaaagattgttgaacccatatttttatcagtaaagaagctgatagcagcacctaaggtaattaacgctaccaaactataaatgacgataatcactggtcctttagtctgaacgttaacatcaagcattggtgcgttagtaaacagctgccacacgataaaaccagctaatgcaatgccacatagcaatactagtaatctaaaaacaaaagttaaagtctttttcattatttttctcctgtatgcataataatactagtataacagcaatatcgcggcatacgaaaaacgcttggatttttccaaacgcttttttactattcttttgcttgcataaattgttttctagtgatgtatttgattgatttaacgtattgccccttgtgttgaattgaaatatattggcctgatggatcgtagccgccaacctttttcaacaataaattctttttcgtcttaggattatacgccttcacattgtaataccgctgtgtgcctttatctacttgagcatagcttgtttcctgggaaatgaatggattcaatctatcagtaaaagagttatgaaatgaaaaaatgcagattactcccactactagcactagtgccgttacaaatgcggttttaatagtacttttattcataatattcaccttcatcgttcaactattgttatactaaaatagtacaccaattcagttactttaacaattgtttctagcaaaaaaacgcttgaaaaattccaagcgtctttcacctaagccaaaaatctttttatagcttcttctacactagcattcaatgattggtgcttcgttgcagcataattagccaatttttcatgtaatgaaggatcaatgcgcacattaaaattacctttaaaaggtttctctggtataactccatcttccttacagctcattagataatcatcaatggctccttgaaaatccttctccaattcatctattgtattaccttcgtaagaaataagactcttaatcccctgaaccttaccaaaaagaatcttatcctccaaagtatattcaattgaaccttcataacctttatacttcatatattgattagtttttttcatctttattcatctctttgattttatcttgaatttgtttgatttgatatggtaatagttcttttctaggatgtggtttatgaagaatgatccgatcactgccctttttaaaaataattctagatccactcgtttttcctttattatcgagttgataatctagttcatgcaatagtgttttagcatctttaaagtcaaacgttctgagactgtaaaatagtttgtgtaaggatgaatgattccttaaatttatttctttaaacattagaaaaaggagttcctttctcgtatgattggtttgaacaaaaaaaacacatacagaaagaagaactccttcatgaatgattttaccaaagattttgctcaagctctattcaatccagacaaaataaatgatttattgcgcaaagaactacaacaggctgttaataacttgctagaagctgaattgactgcctttctgggctatgatccctatgccagaaatggctggaatactggcaactctagaaatggtgcttatttccgcaaagttgatacgcaatttggcccaattgaagtgcaagtgcctcgggatcgcaacggtcaatttcatcagcacacgctgcctgactacaagcagcactcggatatcttggaaagcatgattatcaagctttactccaagggcgtgaccaccagggaaatagccgatctaattgaaaagatgtatggcagccattacagtccagctcaggtatcaaatatttccaagcagatgattccaaaggttgaggcttaccacaaacgcaagctaagcgacaagtttttctgcgtctatttggatgcgacataccttcctttgcgccgagaaacatttgagcgtgaagcagtctatattgccattggcatcaagcctaatgggcacaaggaggtcattgactactgcattgcgcctagcgagaacattgaagtctggacagatatgcttcaaaacatgaaatcccgaggcttaaagcaagttgagctttttctttctgatggtgttgttggcatgaaaacagccttagctcagacttatccaaaagctcattttcaacgctgtttggttcatgtcatgcgcaatatctgcgctaaagtacgcgtcgacgatcgtgaaaagatcatgaacgaattcaaacaggtgcatcaacagacaaacaaagaagaagccacagctgtcctgcatgacttctataccaaatggggcaaggtttacagccatgttatcagaagcttgaaagacatagaaccagatctgctggtcttttataactatcccaagcagatcagagcttcaatttattcgactaacatgattgaatcatttaacaatgtgatcaagcgcaaagctaagcctaaggcagagtttccaactgaacagtcgcttgatgcatttattggcatccaggcaatgagctacaatgaccgttatttcaatcgaattcataaaggctttggtcaggttcaggacaccttagaatcctactttgattaaataaataattaaaaaatcaatttacgagaaagaactatttacacaaaagatttgacagtttcaacgttcttggatgactatataactttattaatagcttttctaatttactcacgttatcctcacttaagtatataatataatatatcatttgtaactaaatttgcaactaagacaaattatacctaattcgctaaattcacgctactaaaaaagcgcttggaaaattccaaacgcttcttttgtttaatcatctagacctaacttcttaaagatatcatcaacatgacgcaaatgatagtgataatcaaatgcatcatcaatatcttccttggataggtaattcataatttcactgttttcaaccaatggcttaaactgcttttgctcattccatgatttagcagttagcttctgtaccatatcataagctttttcacgagatagacctgcttcatcgatcaacttaagcaacactcgttgagagtaaattaatccatatgtacgatccatattcttaagcatcgtttcagggaatacatctaagttagtcaaaattcgattgaagcggtgcaacatatagtcgacgccaatagtcgtatcaggcaagataactcgttcggcacttgaatgagaaatatcacgttcatgccataacgctacatcctcgtatgctgtaacgacatgtccacgcattactcgagccattccacagaggttttcagatccgatcgggttacgtttgtgtggcattgcagatgatcccttttggccagcgcggaaatgttcctcaacttcatgaatttcactgcgctgcaagccacgaatttctgtcgcccaattttcaatactagtagcaatcaatgctaatgtcgcaatgtattctgcatgcaaatcacgaggcaatacttgactagtaattggctgttgtgtcaaacctaattgcttcattacgctagtttcaactgcaggtggaacattagcaaaagtaccaacagcacccgaaattttgccagattcaacgccttttgcggcatgttcaaatcgttcaatatcacgattaatttctgcgtaccagcgagcaatcttgagaccaaatgtagttggttcagcctgaacgccatgtgtacgtcccatttctactgtgtacttatactttttagccttttctgcaatagttgcttttaattcgtgcagatcttttctgataatctcatcagcttgtttaagtaagtagccttgagcagtatcaaccacatcagttgaagtcaaaccaaagtgcacccattttttctcagggccaaggctttcagacacagttctagtaaaagcaaccacgtcatggtgggttacttgctcaagctcagccacacgctctgcagtaaagctggcattcttagcaatcttctccgcatctgcttctggcacttcaccgagttctgcccaagcctttgttgcggcaatttctacttcaagccaagctgcatatttattttcgtctgtccaaattttccccatttctgggcgagcataacgttcaagcataaattacatttcccatggattcttcaaaacaatagtttgttcacgatctggaccaactgaaacagttaccaaaggaacgccaaccaactctgaaacgcggttcaagaatttcttagcattttctggaagagcgtcccaagtcttaacttgagtaatatcttcatcccaagctggaagttcttcatatacaggcttacatctgtataattccttcaaacttgctggataataatcaatcttttcaccatcaagttcatatgcagtacaaatcttgatcttgtcaaaacctgaaaatacatcaagcaagttcaagctaaggccattgataccagcaacacgctttgagtgacgcaatgcaacggagtcaaaccaaccaacacgacgtggacgaccagtaacagtaccatattcatgagcagtttcacgaatacggtcaccaacttcatcaagcaattcagttgggaaaggacctgcaccaacacgagtagtgtaagccttgcagacaccaattacagtatcaagacgattagcacctataccaatacctgaacaaataccaccagaaatagtattagatgaggttacaaatggataagtaccttcatcaatatcaagcatcacaccttgcgcaccttcaaataaaactttcttattttggtcaagtgcatcattcactaagacagaagtatcagttacatacttcttcattctttgaccatattcatagtatttatcaaaaatgtcttcaaatttaagtgctggcttaccataaaccttagtaaataattcattctttacttcaaggttagcacgcaatttttcttcaaaggtgtctttttcaagcaaatcacaaacgcggattccaattcttgaagccttgtccatgtaagttggtccaataccattcttagtagtaccaatcttgttagcccccttagcttcttcttgatattcatcttgcttaatatcataaggcataatgatgtgggcacgattagaaattctcaagccactagtatcaatgccactcttttcaagattttctaattcgccaaacattacttctggattgattacgacaccattaccaataactgtattgtccttggctgcaaaaataccagaaggaattaaacgcatcttgaaagtttgaccattaatatcaatagtatgacctgcgttgttaccaccatttgaacgaactgcaactgcagcatccttactcaaaaagtcagtaatctttcccttaccttcatcgccccattggcttcctacgactgcgactgctgtcatttaaaattcacctcataaaaatctctataaatattacgtatgctagtctagcaattaatttacaaataatcaatataaaatccgaattattttatttttaaattatttcatagttcgatttttatattgacaaacacaaattattcccatatagtatgtctcggtcaacaaacaagattaaagggagcagttttaaaatgagtaactactttagtatggaagcctttgactatgatgatatccaacttgtacctaataagggtattatcaaaagccgtcgtgatgcagataccagtgtcaaattcggaaaccgaacatttaaaataccggttgttcctgccaatatggaaagtgtcattgatgataaccttgctatttggctagcccaaaacgattattattacgtaatgcatcgttttgaacccgaaaagaggatttccttcatcaaaatgatgcatcaaaaaggattattcgcatctatttcagttggcattaaagacagtgaatatgattttattgatgaattagtcaaggaaaaccttaaaccagaatatattactattgatgtagctcatggtcactccgtttacgtgattaagatgatcaagtatattaaggaaaaattacctgattcatttttaacagcgggcaatattgctacgccagaagccgtacgtgaactcgaaaatgcaggcgccgatgcaaccaaagttggtgtgggacctggtaaagcatgtattaccaaattgaagactggctttggtactggtggttggcaattagccgcattaagaatgtgcagtaaatctgcttctaagccattaattgccgacggtgggattcgtcataacggcgatatcgctaagtcaattcgttttggcgctaccatggttatgattggttcaatgctggccggtcatgaagaatcacctggtaatgtaatcaaaattaatggtaaaacttacaagcaatactggggctcagcctctgaggttcaaaaaggtgcttacaaaaatgtagaaggtaagcaaatgttagtgccataccgtggctcaattaaggatactttaaaagaaatgaaggaagacttgcagtcatccatctcatacgctggtggtcgcgatcttaattccattaagttagtcgactacgtaatcgttaaagacaatatttttgatggtgataagtaattttaataaaatttttgcatttttatacgcgtggtgctagttaaatcgttctagacaatatgccatattataagctaaaatagctatttctagccgttgttgaaaacctactaagctcctggctcgattattctcagcattgtaatagctaagcaaagaaaagtcgctttcgattgttcttctaattgccattaactgatgatcattatgctttttagcacccctcatgtttttacgatatggtgtccaaagcacgtatcccatacgctttagcttggctgctaagtcttttcctaaatagccttcatctcctaaaagataatggttaattggatgagcattgatcatcaattctaccgtctcttttgcatcatgtaccgacgccttagtaactgcgtagtcaagcagatagccatcatcactcactattgcgtggactttgaagccataatagtagatttttttcgtcgctttataaccaatatcggctatgccacggaagatcttaacgtgataattgcgaacaggctgacaaactggaatcggaaaactgtcgataatcaataattctccacctacctttacttcctgattccaaccctgacggatacaacgaattagaggcaagagcattcgagctcgacggttaaaacgagaatgagataagccaacgaagaatttacagaatcttcgttgagattcaattccaatttcagtttgccaaatgagcatcgctaagatagaactatcaggaagcttggtctgatcaacatttttacgatgtttaagtccatcaggcgcataaagcttatacagcgagcgacaaatcacatttaaccgattaaaactaacttgtaaatggtgagaaaaacgattaagcttgagatagttcaattagatcagactcttttctatttaaattacttacaacttgagtctagtctaattggacttttttattaactaaaacgatttaactagcaccacgcgtatttttattattttcctgttaagaatattacgataatatagtattatacgcgtggtgctagttaaatctttctagacaataagccaaattataagctaaaattgcaatttccaaccggctttgaaagcctatcagactacgtgctcgattgttctcggcattgtaataggtcagaagcgaaaagtcgctttcaattgttctgcgaatagccatcaattgatgatcattgtgctttttagctcctgtcatatttttacgatatggtgtccaaagttcataacccatttgttttagctgttgatgcagttctttgcctaaatagccttcgtcgccaagaagatagtaattagatggatgggcattttccagcagttcaactgtctccttggcatcatgaactgatgcttttgttacgacataatcaagaatggaaccgtcatcgctaacaatggcatgaactttgaaaccatagaagtaaattttcttggtggccttataaccaatgttggcataaccgcgaaaaattttagcacgatagttgcgaattggttggcaaacaggtaccggaaagctgtcaatgatcaagaaatgtccattcaggtcaacctttttattcatttcttgccgtatctgataaatcaattgcaatagctgacgtgaacgccgattaaaacgtgagtgtgataaacaattgaaacattcacagaatcttctttgtgattcaattcctgtcttagcttgccagataagtaaagccaaaatcagactgtccgtagttttaatttgatcaatatttcgctgatgagtaaactcagccggtgcatacaaacgataccagtgccgacaaattatcactaaatctttaaaactaacttgtaaatggtggctaaaacgcttaagcttaaggcagttcaatcagatcagactcttttctattattactatttacaagtcgagtctaacaagattggacttttttattaactaaaacgatttaactagcaccatgcgtagtattatctatcttttttcgatagaataatataagtcgagttattgtagggtagtcaataactcggctttttttgattattttttaaaaacgattggacagagttttaaattgtgttatactagttgtcgttgatgaatgcgcccttagcgcaactggatagagtgtctgactacgaatcagaaggttgaaggttcaaatccttcagggcgcacttaaaaacgggaaatggctcagtttggtagagcacctggtttgggaccagggggtcgcaggttcgaatcctgttttcccgataagttagccgcacttcattgaagtgcggtttttttgtgtaaaaaaataagtattccctcggaaatacttatcatgctatgcccctttagtagctcgtctaaagataatctgtgtatctgaatctacatatttcaataacggtaaatcgtaatccttaacctgggccaaaacatttactttctcattgcatggcaaatcgcgtttagtaatctcgatttcgccttcataacgcggatacaaatgattatcaatcgtcacgctgccagttggtctagcataaatattatcttgcggctctgttgacaaaaacatcttttttctgctttcctttaagcgaactacgtcacgcgccacatctggacgattatgccaatcattaccaaacaattctggtatatcagtatctaaatgcagtgtaattgcaccctgtttttgataattagtaatcgattcaattgcatccctcgtaagttgcggatctcccacaaaaatgtgatcgcaatcataatctttcaattctaagatcgcagctaatgggttttcatatcgctgcttctccaacgttggcaatcctgcaaaaattggtccacgcaatttgccatttcctgaaataaaggctgctgttttcaaaccatattgcttaagccactcattcttcttttgcatccagtgtgcatcaagacctgtttcaggacgtgggtagaagttatgtcctgctgttaatttttcaaaatttgcattgctataacgcagatcatcaatattttgttgcgtaataatgctggcatttagaactatcggcatttctttggacaacttggcaataatatcagtagaaaatccatgatctactctaagaccagttagactcaaacttttaatttgctcaacactattgacattaatacccaaatcttgcagatcatctgccgtgacatctgcaataattttcaagtctagtttttgacaccaattagttaagtccgccagccgatttaaaatcgtctcactatcagtatcaggtacagctagctgagtaaaaacgcaggtaaatccactattgcgcatcgtcagcaaataattgtaattctcggacgtcaaatcgtgtcctagataaacagaaaatcctaacattcttattcctctaaaattaattaatttcttttattatctatagcttaaacgctttcttaaatatcttactacattttttgcttgcttttttctaaaaaataatgttaaatacatataaacaaattaaaaagcgatgaaaaagacgagtaaataatctaattctttccagtgaattagtgctagtgtgaaactaatagaccctggattattgaaaaacacttttagcagctcactgaaacaataattcttagagtaggttgagacgtctccggtacgttaccacgccggtggagcatgatagtgcttcatgagtcggtctattaaaatatagacaatgtgggtggtaccgcggaaaaaagcctttcgtccctgtttttttagggagcgaagggctttttctttgctctaagtacattagaaagaggacttatattatgacacttattttacctaaagattatcacccaacattaactgtgcgcgacactgaagctgcgattgtatttattcgtgaaaccttccaagataaattggcagaaattctcggtttacaaagaatgtcagctccaatgtttgtcgaaaaaaagaccggcttaaacgacaacttaaatggtgttgagcgtcctgttgcctttgacatgaaggcaatgcctaaagaagatactatcgaagtagttcactcattggctaaatggaagagattggctttgaaacgctatggtttcggaatgcatgaaggactttacaccaacatgaacgccatccgccgggacgaagatcttgataacttccactccatctatgttgaccaatgggactgggaaaagattattagtaaacaagaacgcaacaccgacacacttgaagttactgtgatgaacatttttaaggcaattaaggcaactgaaaagctggttgctgcacgctacccaggctctacttatcgcctagctgatcacgtttcatttattactactcaagaattagaagatcgctggcctgatctttctccagaagagcgtgaagataagattgctaaagaagaaaaagccgtctttattatgaaaattggtgacaagttaaagcgtagtggtgaaccacacgatggccgtgcaccagactacgatgattggcaattaaacggtgacttagtcttctggtatgaaccgcttaacagtaagattgaaatctcttcaatggggatccgtgttagcgaagaaagtttgcgtgaacaattgaaaaaagctcactgtgaagaacgtgagaaattaccattccaccaaatgcttttgaagggtgaattaccttattcaatcggcggcggaatcggtcaatctcgtctctgtatgttgctgttaggtaaggctcacattggtgaagtacaagcttctatttggccagaagatatggttgaggcttgtgaagctgacgatattaagttgctgtaattttaagatttttttacataccaaaaaagatcctgcaaaatgtaggatcttttttctattgattttatttccgttctcttctagaaatccaagccataatcaatggcaacaatacaaagccaaagaccatcatcgcaatggcataccagttaacaccgataacttgccctgctgcgtttactacaccaaattgtgccttccagttatattcaactaacaagaagatcacaatcacaccagataaaattggcacaataacatcagtcataacgctcttattagcctttaagatatcttcttttgccttaccacggtaaaattgaataactgctagaggtaccacgatgaaacctaagaatctaaccatcgcgctcaaagtaatcaagttgaccatattgtattcaaaggccatcggaatcaaaattgccaagccaacagagataaagaaagttctaattgggaagttattcttagttctcttagttaaagcttgtgacatctgaccctcacgagccatagcttccagaatacgtggagcattaaagctggaagctacgttgatcccaaacattgaaaccaaggcaccaaccaagattacatcacgtaagatttcattattaaaaatagccgcaatcgctacaacttgcttagttgtcattaaagcacgtggattaagtaccatcgctaccgctacaacgccgatatagacaaccgcaataattaagattgccaatggaattgctcgtggcaagttcttttcagggttcttcatatcttctgaaccagaagctactgattcaaagccggtaaaggcatagaaggctgaaacaattgacatgacaaaggtagttgtagttaaagttggcacaattttctgaccattctgagtcaattgatctacttgccctaggttgcttgatgcaccagtagtaattaacaaaactactccagcaataataattaataccaatgcagccaacttaccgatagtagctaaattcattacatacttaactactttttgaccaaacaagttgatcacggtaataattgccatcaagatcaaaaagccaattgtgacatttattgccttattgggatttccgccaaaaattgaaatagttgacttaattaccccaacagccattacgccccaagctacactggctgagaagtaacgcagaactcccatataaaagccaatttttttaccaaaagcggccttggaataagcataggcagcaccagatttagtgacatactttgaagctgccgcaaacgaaatggccagaatcgctgcaaaaattgccgcaattaaatatacaactaaagctttactaccggcttgctgtaccacactaccaggtgttaaaaaaatacctgaaccaataatggcattaatcgctaacagcacaattgaccaaaagcctaatttatctcctgttttttcagtcatctatttgcttccttactttgcattatcaacaacaaacttaaataagttattcataaacgctacatcggaattacggtgcaacatttcagggtgccactgcacggcaatgacattaccttgtttattttctagcccttcaaccacaccatcaggagctgttgccactgcttttaaatctggtgcaacgtctttaattaattgatggtggaaagaattaacgcgaaattcagttttgcccaaaatttcagccaatttactatcagcttccacttccatactatgagtaggcaaagttggcgtatgaccttgcatgtgtttcaaagtaagttcttttctgtatgaaagatcttggtaaagcgtaccgccatgagccacattaataatttgagcaccacgacaaatgccaagtaccggaataccattttcttctgctaactttaacaagcgcatatcaaaatgatcgcgttcaggccaagtagcaccaatcttttgcattggctcctcaccataaaaacgtggatcaacatcatgcccaccagataagatcaagccttgaacatgattaagctgttcacgaatcacctcatcattttcagtaaatggaataatgtaaggcacaccgccattttgaactactgaatctacatagtcttcgttcacataactacgatggtatcctgggaaaattcctctatcgtcaataattacagaacctgagataccgataattggttttgtcatttatgctcctccttctgcttactttttgtatgtaatattatagagaaatttatgcaaaaagtacaattaaaaaattgcattgttgtctataatttttgcatatctttaaatatagtaaaaaacagcaagccttatttttagctcactgttttatgctatttataccaaattccaaaaaggatttccattacatgctaaatatgtttctagccactgtttaaaagagaaatcaaaatattgttcctctattccaggatacgttagataggactgtttttgattgtagcgatctaaattaatgcccatttctccctcgtctcttaaccaaagtataggtagataattaggtgttttaactaactgatttaagacatactcaatagtgtaaattctacaccttgctccacctaattcgatgccttgaaaagaatcaatgaataattctgcaccgttagcctgtatccaaaactctatcaaatcatttgggacagatatgcctgacaacctatttattttattttcagctactggcggatttaatttaaatttacagtaatagacgccaccaaaaccaaatattggtacgtcgacactgcattttttactaatcaaatttatattatctattatattatccattttaataattaataaaccatttagttataagcttatgtgcttcaattggtactggcattaagttgtcaaagtcattatttccaccataaattctaggtcttatatgatgaacttgattttcagcccaatactcttttgattgattgccataacgctcactaaactcttttatatagtaatatctatccatcgtagtccatactggtgaagaaggaagtctagaccaagtagtattgattggtgtttctgcatcttttttagagacaggatcaacatattcaggaaaattttgaccaattttattttgtaaataaatagaactaagtgaaattggataagtagcgctatttccattatagcctaccattccccatgctcctccaacagcaaaaaatgttgtagcagctggaaatacagcagaccctaacaaaccagtagtaatattgccttcttttacaattggactagctgtatttgtagtaattgggccggacaatgatggttcactatagaattgcaattgaactgaaattgcagcaggagctggaccagttattgaatcaatataaaaattgattttaaattgtccatctacatactcttgtgaagtatgaaatttaacaactgtatctggaatctctgccaaaaaagtatatgcagagtaatggctacttgttgcattaaaattattatgaatttttacagttccattttttaaaatagggacatctttttttacattttcattctttaacttatcttgagctaaagaatgaaaattttgttcattagctattttagcaacattcttatttacatcatttagcgagtcagcctttgcatttgtattgatagctataaagcacacgatagtggctaaaaaagcaaataactttctgtatttcatgtttctttcctcattatctataatttttaacacaattataaggatctttctattattctaccatacaactctatcacataagcaagtgctcccacactgtagcatcagatgctactgggatttacactctagattgatgtatacgaagaacacaattacaatcagaataacatgaaatactactatagcgacaatttaaaatatacagtaaaatctttaaactgtatttcttattctaacccttgttcaaagcgatactgccgtaatacatattccttgaaaaacggtaaagtaaaggccacttcaccataattagtagatttgataacttgatcatctaacaagcgtctacgatagttagcaacaaaattgcttggacggtttaacctttcatgaatttctttaattgaaacacaatgttttgggctctgagccatagctaaaacaaattttcggtcttgctttgacaaactactaagtactttggtataaacattttgctttagcaccaataagtactctgatttaatacattctaaagtgttttgatctattaccttactttttttagcagctttcaaaactaaataacctagcaactgaaaggcatatgaatagcccattgtcatcaacgccattttttcaagaatttttttcgacacttgataacctgattctttaaaaactttactatagctagcttcaacctgtgagagattcaatgctgataaagctattcgctttccacgtagtaagaatgaagttatattttcgtttttcaattcagagatattttcagaaagaccagctatcattaaggctataggataaccctgccgatttaataattgataacatcttgcaaaatctttcaactcctgacatagttttacttcgtctaaggtaatcaacactttaacgtcattttttcttacttcatcaaacatgttcgttaaaatatcttgatatgttaacttactaacgtctgtagaaagcgataatccaaaattagagaaatttagtccttcaatagatttaaatgatttttttagttttgaatctgcattcagatataagctattaataaaagaaggcaacaacttcatccccatggccaaattaacaacaatccaatctggatatgcactaatctttctgtccattgctgtcaaaaagacagttttgcctattccacgcattccataaacaatcgaaattgtatatgaactatttaaattctctattccttgagacacatcagcaattagtttttttcgctgcaaatacactgctggaattcggccaaagctaggattaaacggattatccatattttgtccccaatcattttcttatcaaaaaagcagcaggcttcttacctactactcaattttatttatctttttgatgcttaaccacataaatcagtgccgcaataatcaacactgctgcaccaaccgctactgaaatttgcgtctccggattaatgaacatgaagacaacaattactaccagcataatcaaagcaaagtaatttgaatatggataaagcggcaatttaaacgggtgattctccatcaagtgtggattctttcgtctaaagcgtaactctgctagcaggatcacaaaccaagctaccatccctggcaaaacagatgaactatagacaataacaaaaacattagccaatgatttattcaaaaattgggctaacacattaagcataaaaccaacgaaaattccactggtaattccaatgatcgcatgactaggcacgattctcttagatacgtgaccaaaagtcttaggtgcttcaccttcgtgtgccaatttatacaacattcgacttgatgaataaattcctgagtttgcaccggacaaagctgcagtcaaaactacaaagttaattactgaagctgccgcggtaattcccaccttggcaaaggtcgttacaaacggtgagccaatgctatctaatttattccatggataaattgtgacaatcacaaaaattgccccaacataaaagatcaaaatccgccacaatactgacttcacgcttttaacaatggccttatgcggatcagatacttcaccggctgaaatcccaattagctcaattccttcataagaaccaacaataatggccattgagaaaaagaagcccttgagaccaccagtgaagaagccgccatgactccacaggttagaaaagcctactggatgaccgccattaccaaagccaaatagaattaccgcaaagccaagtaaaatcattaagataatcgttacaaccttgatcatggcaaaccagaattccaaggttgcataagctttcgcactagctaagttagccaccagcaaaaataaaataataattacgccggcaacccaatcagaggtgcctttccaccaaaagcgcaaatactctgttgttgccaccacctcagaaattccgacaacaatgtattgaaacacgtttgcccattcggctaaatagccggcaattggatgcacatgctctgaagcatagtctgcaaaagaaccagtacctggatcaacataaagcatctcacctaatgcccgcattacgatatacaaaataaccccaacaaaaatataagctagcagtactgaaggaccggtccacttaatggttgagctagcccccatgaatagtccaacaccaattgctcctccaagtgagatcatttccatctgtccggctgtcatcgaccgctttaattcaggtgctttcttcgccatttccaactccctttctttagcatctgtaaaaatttcctaggaaatatatctattctcatttatctttaatcactataccttatcattttttcgaacaaaactgtagctgatcgctaaaaagattgcaaataaaatcgaaataatcaaagccagctgcgttgatttgataaagaataataagattaaaataccaatgtaaaaggcaagcgtaagccagctagttactgggtagcccggcattttaaagctgcctaaattctgcttattctgtttgcgataaacaatatgtgctgccataatcatgatccaaacaatcacaaaacaaatcgttgaaacagttgagacaacggagaatatttctgctggcattaaatagtttaaggcaactactacaaataaaattaatgaagaggtcatcaaagcgttcattggaattgcttttttggtcaattcacctagtcttttaggtgcatggccgttacgtgctaatgaataaagtgatcgactagttgaaaagattgcactattagtcgctgacatagctgcagtcaaaacgacaaaatttaaaatccctgcagccgctgtaacaccgatgccggtaaagacctggacaaagggacttgaagtagttgtaatgtgattccatggataaacagacataattgccaacattgagcccacataaaaaaggccgattctaactggcaaagtgttaattgccttaggaatatccttttgcggattagctgtttcactagcagtttgacctacaatttctaccccaacaaaggcaaaaacaaccatttgaaatgataaaagaaagccccaaatcccagttgggaaaaagccaccatgattaactaaattagttagtgaaacataaccgccctttacatgcgtatgaagtaacaacattacagcaccggtaatgattaagactacaattgccattaccttaatcattgagaaccaactttccagttcaccaaataatccgacatttaccatgttaatcaacatcaataagatcacaattactaaagggccaacccattgcggtagccacggaaaccagtatcttaaataaattcctgtcgcagtcaaatcagccatagctaaactaagccagcaagcccagtacatccagcccgctacaaattcggcacgcttacctaaatattttttgattgactctaaaaatgaatgactatcaggatcggctaaaataagctctcctaaagcacgcatcataaaaaaggtgataatccctacgattaagtacgacaaaataattgaagggccagcactatgaatggctgaaccagaacctaagaataggccagtaccaatggctccccctattgcaatcattgttacgtgacgactcttaagcccgcgttttaatctcggcttctcatccataattactcacaccttcctcaaaataaaaaatggagcggcatgttttttaaatgaaacatgttgctccatcaagtttgctttttttgaattatatagtcttataccaattcatgcaattattttttatctaaaaaagatattcccttaggaatatcttcattattagtaaactttaaattggttcaacggccagtaacgtactttaactacgccaacgatactactacgcttaatggttccgatataacggctatccttagaaacgctccggtgatcacccattacgaaatatgttcctttcggaatgcgcccagtatcctgcacatatttaatctgcgctctagtaaagtattgctggtaagtccgcgcccgcatcagtgactgcatagtaaaattctgagtctcagaataaaatgtatctgagccattatcaattaacttcgttccttgtttcaaccaaggttgagcaatctttttattattaatgtagatttgattatttttgctgacgattttttcaccaggcaaaccaataacacgcttaatgtacaaagcacctggttcatctggtgctttaacaatcactacttcaccacgcttgatttgcgcatgacgctcagcgattagccgatcaccattttgaaaagtaggttgcatcgaaagacctgatactgtatcgttgctcaagacgaagtggaaaagcagcagataggcaccgatcaaaataacccagataattaagatatctaggaaaaacttaccccatgattctttttcttcttttttctcagccattatttttctccatttatctttttccacagtttacaactttatggagaaattgccaaattacaaaaaagaggtatttcctcggaaatacctcttttattattaatgactattaattagtcttcttttttgtcttcagttttagcttcgtctgaaacttctaccgttacacccttcttagcaagaacatgagacatcttcttcaagtaaatgttaatgatcttgcccatgtcttgttcagtaagtgagttgaatggaacgattgcgtccaaacggttcaagaattcaggtctgaagtagttttcaagggctgagattaacttgtcttggtcaaccttgccatcttcaagcaacttgtctgagaagccggcgtttgaagtcataatcaagatagtatccttgaatgaaacagttctaccttgtgcgtcagtcaaacgaccgtcatccataatttgcaataatgcgttgaagacttgtgggttagccttttcaatttcatcaaataaaattaatgagtatggttggtgacgaaccttttcagttaattgaccaccttcaccgtagccaacatagccaggtgctgaaccgatcaacttgttaactgccatttcgtcttggtattcactcatgtccaaacggattaagtgttccttgttaccaaataattgaattgccaattgtttagcaagttcagtcttaccaacaccagtaggtccagtgagtaagaatgaaccagtaggtctgtcgctgtctttgaaaatttgcttacgagcaatagcgtcagtaattacatcgatagctctgtcttgatcaataacattcttcttaagtttcttagctaagtccaagttcttttgagcttcatcagcgtgaagttcactcattgggatcttagtcttttgttcaataattgcgtagatgtctttttcagttacttctggagtattcttagaatctacattcttaagttgtttctcaagttcagcaatcttactcttaatttctgaagccttgtcgtaatcctctgccttagcagcttcagtcttcttagcttcaagagctgagatttggttctttaagctcttttcatcagttgattgtacaagcaatgccttcttagcaccagcttcatccatcaagtcgatagccttgtctggtaagtaacggccttgaatgtatctttctgataattcaacagctaatttaagactgtcgtcactgtattttacgtggtggtagtcttcgtacttcttctttaagccttccaaaatcttaacagctacatcagtagatggttctggaacttgaacagcttggaatctacgtgataaagctggatctttttcaattctttggaattcactagtagtagtagcaccaattaacttcaattgaccacttgccaaagctggcttcaagatgttagctgcatccccattgttgttttctgaatcagtagaaccagcaccaacgatgttgtgaatttcatcgatgaataaaacaatgttaggatcgctcttggccttgtcgataaccttctttaatctttcttcaaagctaccacgaagacttgaaccagcaaccatgtcattaatatttactgaaatgatatgcatgttagccattttagctggtacattacctgaagcaattctttcagctaaaccttctacaatagaagtcttaccaacaccagcaggtccgattaaaacaggattattcttcttacgtcttgaaagaatttcaattacgttatcaatctgttcgtcacgaccaattactgggtcaaatttattgttcttagcttcctcaactaagtcaacaccaattggcttttcattgggttgttgtgggttctgttgaattgtttgtggtgcagcacccatgctgctggagtaattaattggaattgaacctgaactgcctttgctatttcttctgctaccaaagtcgtcattaaagaatgagctattcaattcgttaaataagttatcaaaatcattgtcaaagtatgccatatgtgcaacactccctatctcaaatttacgtctttagcactctagcttatcgagtgctaactcattacatttaatagtatagcaggttatccacagactgcaagctaaaaaacaaaagttttacacattttcctttatttttgtgatttttatttaaaaaagcactacaaatgctgcaatataaacatttgtagtgcttcacaaattataaagaatttcttaagatgggcaaaaattgatgattattttgcttaaaactgttgaattttaaggaagttttccacagataagaataagtttattaccataaactatttctgcctacctctattattgcccttttgcttgtccagtattttgcggttcgctcaactttctcggcccaagaaaatactgtttaattactttgattacctgcttattctgaggtaaatccgagtgatccgcttctacacccgttactgtcattgcagtatagctcttgacttgattctgaaaaatatattttccggctgctacgctagcttctggtacaattccatcagactcataattttttccaccagataaggaataaacaatcaagtttttcggtagtttatctttgttcttgataaagttttctagcatttgcgttttatgattaatatttttttcaccaaaattatatggcgttcctagcgtcatcagacgtttgattttaatttcatcagaatagtaacagtagtaatgttctaaccaataggtccagatcaagccaccgttagaatgcccaaaggctttaaaattattaaacttatagctctctgataaggcataaaaggcttgatcaaaccagctggcttgcttcttaatattgctataaccatcgtgattattttcaaaaccgacaataatgaaaggttcgttgtcgtttttattaattttgcctgaatatgacagcgttccattcgttgaaactttaattttaagcacgctatgcttagtcggtgtgttctgatttagctgcttcactaattggttaaaacgttcagtcgttgcactagaacctggaatcataattactggtgacaaaagcgatttgcgtctttcagctctagcgtggttatcagccttcatccaagaataacccggaatagccaaagctactaataagactaagacgattgccaaccatttaaaattaggattttgaactaaattaatcatttttttcttcataatcctttagtcccctttcaagtcgcaaacctaatttcatagttggaataaacattattatatccaaaatgaataacaaaatagaaaataccaagttgctccaatcaccattggaaccaaagaaagagaccaaaattcctggtgtcccacttaaaacggggtaagcacaaggttgaattaaatggcaaaaaattgctccagcggctagtagaatattaataattggaataatcacaatcgccggcagtaacaatggatttaaaataatcggcatcccgaccatcatgcctccagttgagcccaaagctgctggaagcaggttaaccttggcaatattttcactatccttatttttactataaattaggataattacaatcatcgctaaaacaatactcgcaccacccatttctgcataaggataaaacaaagaactacccaaatacttatatggtacattccaagcactcccatgttttaaggcaaaatttaagttagctgctgctgaaatactattagaagtagttgacaaagaagctagaggataacctattcccatccagctaagtaaaaagactgggatagtcagtaaagctattaacaaaatattatttgattcctgtatttgagtaactaggcctttaaaagtactagaattcaagaatttgatttgaaattcataaattataatccccagaactatcccacaaaaaattgcaaatattgtcgggataaacgcattccaggctctttccttaattctagcggcatgttcaaaatcgactggcttgtgttcctttcctagccaatgaaaaatttgccctacaccatagccaattaacaaggccagcaagacagcattaatttttaaaacactggaagaaaatggtgaatgatcgctggcattattagctaaattattggcataagcacaaaacatgataacgatgacagccgtcatcccggccatggttgaatctttacggtataaacgcgcagtataacgtgccgcaaaataagccgcataaataccaaataagccgaaggttacccgaaccatcccccgactgacaaatgctcccgcataccaaaaacgatctggcaaagtgatatcaaaattaaaaatattgtaaataaaactatcgggcgaaaaaacggcatctctgaacaacttaaaatatgccccaattaccgcgatcggcatcagcataaccaacgttcgctgaaaaattctaaagattgccaatcttcttagtttaagaaagatatttgtgattctgtttaccatggtattttcctttacctatctattctaaatatgattgaataaagttaattaaaacaattattaattatacatctatactagaaagctgattatgatggcttacattaacttaaaaaataatactaaaatttaccaatctggtgacacaaccatctatgccaataagaacattactttttctatcgataaaggagaactagtcattattctcggctcatcaggagctgggaaatctactttgcttaatattttaggcggaatggaaccaaatacaagtggcgatgtaattgtagcgggaaaaaatattgcaaaatataacgctaaagaattaactacctatcggcgcaacgacgttggctttgtttttcaattttataatttgattcccaacttaacagcaaaagaaaacgttgaattagctgctcaaattgtccctgatgcgatgagcgccgatgatgccttgcagtatgttgacctagggcagcgagaaaacaattttcccgctcaactatcaggcggtgagcagcaacgtgtggcaattgcccgagccatcgctaaaaagccagccttacttttgtgcgatgagcccaccggtgcccttgactataaaacaggcaaacgaatcttaaaaattttgcaaaatatgagccggcaaaatggctcgacggtcttgattgtaactcataacgccgctattgccccaattgctgataaggtcatccgtattcacgatggaagtattcaaaaagtccagcataatctacatcccgctgatattagtacaattgaatggtaggtgggcgacatgcaaaaaactattctatggaaagatgcttggcaagcaatcacccattcacttgaccgttacattgccattattctattaattgcactggggacttttgcctttacaggtttaaaaatggctggtcctgatatgcgagcaacaggggcagaattttttgccaaacataacttagctgacgtcactgtcacttcaaactatggcattaattcaactgatcgccttactattcagaatttaccggaagtaaaagaagctacttttggctattttcaagatgttaaaattaaaaatcaacctgatacgctccgcatcttttctcaatcagataatctttcaagttatgaattgattaaaggtcattttcctaagaataaaacagagattgcactgtcatatttattgcagaaaaaatatcgcttggggcaaaacattacttttaataaacctggcattttaaaaaataagacttacaagattgttggcttcgtcaaagctagtgagttcttagataaaaatccaatcggtcaaaccaacattggcagtggccatttaactggaattgcggttgctaatcataacgccttcgccgcaccagtttatcaaattgcccgaatcattttcaaaaataccgccaatttaagtccctttggcatagcttaccgcaaccgtgtttataacgatcaaaccaaattgcaaactgctttaaaccaaaatcgagccgacaaatatgacaaatatcgggccatgtatcaaaagcaatatcgacaagctgcagctaaacaattacttaaacgtggcatcgtagttaacccggcgcaaatcaaagtaccacagaacaagcttaaaattgcttatcctaactacgtaatcaacagccgtgaagaaagtcagggttatgcttcttatcgagcagattctgaacgagttgaagttttggctaatgtctttcctgttttcttgtttgctgtagcggctttggtcagcttaactacaatgatgcgttttgttgaagaagaacggactaatattggtacgctaaaagcactaggctatggtaatggagcaattgccattaagttcttgctctatagcacctcagctgcaattttaggtgttattctgggggctagcttaggttacacctttttgcctaacttaatcatcaaggcctatttagctagctcaaccttaggaactgattaccagctgaattttgcttggggaccactattaatttcattgacgattgcactacttgcaacaaccgtcgtttcaatgattactttagctcaaactctgcgtgaacagccttcagctttacttttacctaaaccacctaaaaatggttcacgtattttactagaatatattccatttttatggaagcacatgagcttttcagctaaggtaacagcccgcaatattttccgttataagagcagaatgctgatgaccatcctaggcgttgctggttgtactggattactagtaatgggatttggtattcgtgattcactacacggaattggcaatattcaatattctgaagtacaaaaaaatgatgtcatcgctttgaaaaaccgccatgttaacacgactgagcgacaaaaattaaacaaaatttttaccagccatgatgttacgcaaactactgctgtacaatatcaacaattgactaaacaccttgatagcactggagcaactgaaaatgtaatgctaattgcgccacaatcaactaaaaactttagcaaatctatcaatttgcaagaacgtcaaagcaagaaaaaacttgttttgtcaaataatggtgtagtcatttcagaaaaattagctactatcttgcacgctcataaaggttcaacaatttccttaaaaaatgaacatgggaaactacttaagttcaaagttagtggaatctgcgaaatgtatctcggtcactatatctttatgagcccagctgaatatgccaaagaaattggcaaaaaatttactactaatgcctatttagtaaccatggccaaacattccccaggaaatatcagccatattagtcaaaaaatgatcaaaacaggcgcaatcgaaacggttgtctcaacttcatcaaatagaaaattgctgagcagtttcactggtagtctaaatgaagtcattctaatcctaattttaatttcagggatgttggccttagtagtcatctataacttaactaatatcaatgtcgctgaaagaattcgcgaattatcgaccatcaaagtgctaggattttacgataatgaaacaacgatgtacatttatcgcgaaacaatcatcttatcggcactaggaattatcgtaggctttggctttggttggtggctacaccactttattatcactagtttgccaccagatgtcgcgatgttcgatccgaatatgtacccgttgaacttcgtcttctctgcgctaattcccgctattatcaccgctattttagcaattgttgtccatcacaagatcaagcgaatcaacatactagatgccttgtcctccattgattaagcgctgttatgctataataatcactatagaaaagggtggaaaaaacatgccaagaaagcactttgaattaaacagtgatgttaataaattaatcgaaaaatatgatgaaattaataatgttgatttcaataagttagttaacaaggccttaagattctaccttgttaatcaaatgaactacaaagatgttcaagacgccctgaataaagctgataacgaagcttctaagtatattgatgaagcaatgcgttccagcatgggtgatattaatcgaaattattagaacataactaatcatggaaaaagccatctgttttgacagcaggtggcttttagtattcattacaagataatttattataaaaacaactaattgataatttctttactcaaaatgcttataccgataatatcgataacctatctttttaccaaaaatcgtctccgaagttttcatccaattagccagcaaaacataaatgcctaaaaagactaaaccgaagattgctaaataaccaaaactaccaacacggcctaagtcgttgaaacgatagccaaataaaatttggtaaacaaagagcaggataatgtaaatctcgtttgaaacaatgatcggcaacaaactccccatcttaacgccatatgtcttattaagcttgtgataactgagccaaattaccagtaagaatgaaatatcagttgaaagaattgcaccatccccattcatgaacatagtcatcggtacttgcaaaattatttttactaagacaccttcaaccatatagatcacagccagtttgttcatgttcaaagctaaaagcagtgttaatgaattcatcaccaaaccagcaaacaaactttgaacaatattttcaaccaaataatacgcacctaaactatcgtgtgagaacaagaccgtataaattggagaagccgcaaaagcaccaagtgcaacaaccggaagcaagacaaataatagtagtctatagttctctaaaagcagctttctaatgctttcttgactatcattagccttatacttaagccctgctaaaagcggcagactagtctcagaaacggctgtcgcaagtgaaataatcaccgtggtaatcttgcttggattagccgagaaaattgtgtacaagtaactaacatagcttttactcatatgactgaagctaatcaggatttgtttaaacaaaagttgatcaactaattgcgtaacagtaatgaacgatcccagcaaaacaaacggaattgaggcataccataagttaagcaaactacgagaaacattattaagtgctctgggctcgctattttcaattaattctcggtaatgtccccactgcttgcgcatatatgcaaaaagatacaggtaactagctatagcaccaacacaggcgccaaacacactgaaataaaccgccgttacgtaatcatgatggaagacttcaataatcaacaaagtagccagcaaaataaacaaaattcgagcaaattgttcccataattgggaaatcccatatggcttcatatcattatttccctgaaaccaacctcgaaccatactcattgatggcagaattactacggctggcactaatactcgaatagaaattgttgcactagccactgaatccactggactatttttggcaatcattggtgccgtcacataaagcaaaataccacacgctattcccatgaccagcataatagcgaagcctaatttggtaatgtacaaactgtctttatatctattttgcgaatttaattgcgatacttcccgggcaataactgaaggaagtcctgccgtcccaattgataaaaacagcgcatacggcgtatatgacgaattgaacagcgcctgtgcgtttaattggttgtggtagcttcccagcataattagccaaggaatcaaataaacaaccccgagaattctagatacaatgctaccaaacgatagccaaaatgaaccggataggatttttttattcaatagaatagcctcaaatctacgttagtttctcattgtgccttcttattatacgtggattttataactttgtgggaaatatgtaccaactagttacccttttttaacaaatttttcggctctaataatacaaatcagttacattatttactatattgttacccagcctttaattttacgttagaccccttgacctaaccttctttaattattatccttaaaatgtttctgttaaaggtcataattagacaaaaataataatgtattaagaatattcatcgggggaattaagttgtcattcaagaaaaagattatcactaaattagcttatgttgctatgctttcaactactggcgttgccgcagctgcaatcgtgcaaccacaagcacatgttcaagcttctaccacttcagttgctgctcgctcactcggaatcgatgttgctagttaccaaagtgctgatctttcagctcacgctaaaagcggtgctaagtttgctgttgttaaagtaagtgaaggtaccagctacagaaatcctaaggctagtgctcaaatcgctagtgcccgcgctaagaatatgatgccaatgggctaccactttgctacattttctgctaatagcgctgctgctaaaaatgaagccaactacgcaatcgcatcagctaaggctgttggtcttggtgctggctcataccttgcatgtgactatgagtcaggtgacggcaacaatatctatggtggtaagaatcctactgctaatgcaattaatgccttcatgagcaaggttaaagctgctggttacaagccacttctttacgctagttcatcagttttaagaaacaacattaacactaactctgttgttaacaaattccctaactcattatgggttgctgcatacgctgtttcaggtcgagtagacaatcctaactttgactacttcccatcaatgaagggtgtttcaatttggcaatttactgacaactggcgtggtcttaacgttgacggtaacattaacgttttacctcttacttcatcaggtagcgctgtttctcaagcacctaagaaggctcgcgtattaaagaagaaggctcatgtatataacaaggctggtcaccgtacaggcaagactattaagaagggcacttctatcactacccatggcaagaagaaaactatcaatggtaagaaatactacaagattgccaagaatcaatacattagatcagctaacctttactaaaaaggcaaaataagtcatcaaaaaatgcaccaggtagaaattacctgatgcattttattttatccaattttttacttggcgaattgttcaccagctaagttacggtagaagttagccttagcttgacggtaatatgggttaacccacaataaaccgatcccgcaggaaataataccaagtagccaccagccgatgaaacttaaatcaaaaataaacaagtccatcttatggccatccatcaacttacggctggcactgatagcttctgtggcagtcggctcatgaccactatctagcatgtcacgcaagatatatggtgtcactgcatatgaataagccttgatcagccctggaataatcagtaaccaagtccacaaaataagaaaaatttcatataaaatataagttaaaaagttactcttaaagtttctggtaaatggactaaagatacctgaaagaacattttccttagtaccactatatctaaaatgcaagatagtataaattacgccccatgtgattaagccaattgcaactgaaactaccaaagtaatcagccatgcaaaaggattaactcttactttatctaggtacatcaattcagcattgttaccgaagcggcggacaataccgtacacgatatcttcgcccttttcaaaaaagttttcgatatcggtcaaaatataaacgattagccagccaacaaatgacagcaaaactgcccagccccagttaccacgtaactggtctctagcttgttcttttaattcttttcttgtagtagccattttctctcctcctcacttttctaatcatgagtattgtcgcctaaaatcagggcagaatcaattaaaagcacatcaaaaaagcctaattccaccaacatcggaactaggctcacacagtgttgaccgccactctgaccacatatagaagataacattttcgctaccggagaaaatgactactaatagcgacggtacatgatagattttagcattcaactacctaaaagacaagcgaaaagacgtgttgaattagcggaatggataccaaaatttacggataaaaaagacgaggtctaaacctcgtcttcttcattactaaaattcaagcatcatcgtcattgcacgattgatcttctttttaatctttttaaactcaccagaagcagtatgattatcctgcaaaatgatcatgttctggccatctttagttgcccgcataaaggtataatacccttcaccagcaccattagcagctttataatgctttaaattataaagtccaccattataatagctaggagcctgacccttgaacagaacttttctactcttgttagtcaaaatcttaccagcaagaatatactgcatggtcttagctaaatctgcgttagacattacgattgaaccagcacccagctcattgtgagcatccttaacggctttagcatggttcactttgacatattcaccctcacgcatttcatagcctggtacccaatgactagccaataacttagccttgtctgaccacaagaactcactatgggttagcttcagtggcttgatatatgtgtcatggaacaattgctcgtatgactttttctcaagcttggacaagattccacaaaggaaaatatagtttactgaagtatagtgccacttacctaatttgctagcatcaaacacagtatattgtgcatcatgcttgatgttcgcttcatcagagataaactcaggcgtacctaattgttgaccagctttcaaatccagccctgatgtcatatcaattaagttgctaatcttgactgaactagcaccatctacatttgggtagaattttgaaagtttatcgctaagcttcaactttcctttctctacctcatgcatcaccattgcagctgtcattgacttttgaactgaattgatcaaatagctagtgtcaggtttattgtccgtcgcataattaagcaaaactttgccatgatttattactaaaactgagcctttaacgcccacatggtcaatagcctggcgcactattccgcttttaaacggtctttattgcttaaatcaactcgcttaacgttatccttgttttgccacttcttggagtagaagtagttagacatatcatagtcatagcgcttattaggttccttcatgaatggacgaacagcttgatcaactgcaacccagcctttccagcctaggtgaatagtatcttgcataaagtacttttcattgcctcgtcttgaaagatctgcaatattttcaaagccttgactggttaactggtgttccatcttagcaacagactcttggtacatcttgctagataaaccagtgtacttcatccacttgccattaattggtgggatgataaatagcacattagtgtgttgcttagcaaactgctccaacatcaattggaaatcaccatattctactgaatgtacatagtcaaaatcacgctgactacccttcaagcgtttcaataccttctttggtaaacgtgttctaaagaaggtattatcaatacctaagttgtttgagttagtgtgtatagcagcttgctctgctgcaaccttattcaaagcagctacagaatacttgttaggtaaaaccttagctctcttttgaatcttatttacacgatcacgcaattggaatgagctgaagaaattatcttcgttacgcaacattcgacgacgattttgtaaataaaatttttggaagctagtcaacttcttgccttgagcaatttgcttcagactattcttgatttcaccttttacatctggcatttccaacagacgtttagctgcataacgatcagttttattattcttggcactaagcaagaaattacatgcttgcaatggtgaataatacaatgcaaaggcattaggatcttgaccccgcttagtaaaccattgtggtgaaatgatcacaacagccttcttgtttctaagctgcttagctgttccttgcatccccaagaactgagccaaagattgactacccggtccacctaataagaatggacggtagtttctatgatacttttccgcaattacactagggtgaagtgggtcgaatcttgacaactcacttgaaccatagaatggcacgtagccatcttcaaaagcttcctgcttcattgtgctgcccttgaagacagttgtgttttgtgaagctgcagcctcgtaaatcatttgcttagaaaaagttctttcccaaggaataaggaaaacaactaacaaaaggataaaagcgcaaagaactgggccaaagatttgccacagccggcgtttattactcattttctaagctttccacctttgccacaatcttgtttggagtgtcccattcttcacggttaaattctgaaacaggaacatcaatatcaaacttttcttgcaagttcaaaagcatttgtacacttgccattgagtccatcaaaccattgtcaaagatgttttcatccatttggtctgataaatcttcaccagttaagtcatttaaaatatctaatacgccttgttttgtatccataattaatacctctcaaaaaacaactcaatacttattctacttccagccgaaccacagttgacttaggaaccctgagaaaatcaagaaactgaaacataccacattgaaggttaagaaaatggcgaaccatttagtaaacttgttagatggaatttgcttcttatgctttctcttgaatctaagccacatatcgttgatacaaatagctgaagcatggaatataccataaacaatataataccacgttaagccatgccagaaacccatgattaagaacaacaggaagtaagaaacttgtgataatctaattcgattcttaaacattttcttcttcattgcaaagaaagtgaatcgcatgtagatgtaatcacggaaccagaatgataaagtaatgtgccaacggttccaaaaatccttaatgttcttggaaataaatggcttgttaaagttcattggagtatgaatacccatgaagtatgagattgatacagcaaacaatgagtaacctgcaaagtcaaagaacaagtacatactgtagcaatacatgtaagctacaagccaccatgatagcttcaagccgccatttgcattacccacggctaaagcagcgacactgatttttggtagccaataagtaccgaagaaccaaccaataataaatttatataaaaagccttggaacaagtatctaacagcatactgcatatctgtaatgtatgcatcacgcgtaggtaccttatcataatcttttttaaatctacggtaacggtcaataggacctgaagaaatagttgggaagaagagtaagaaccttgcataagtaatcggatctaccttcttaattgccccatcacgcatttccataataacttgtactgtcttaaaggttacgtatgagattcccaagaaaccaatgacaaagccaattgagttatcaggaaaagcggtcaaatatttaactgcggctaatggaataattgccaaaatcacagccaaactaaagatccaagtcttatttttaccgtggtgacgataatactgataagcaaaggttaaggcaaattcgtaaaccaaccagattaacaggttaaccccttgctcccagtgatcaccatcaaaaatcaagaacaagaaaacaattgaaaaaattgcttcatatgtcttgagtcgatgaccgtaatatagcccaatgataattggaattaatgcgatcatcaaatagatgaaatattgcggattagaataaggctgtaagttaatgaaattaaaattcactacttattaacctccttaattaccgccttaatatctaccttaccgttttgtgaaataggtaatgcatcttggtagatgtaccgctgtggaatcatgtaaggcattatattcttagctaagtcttcacgaatcatcttagttaaagcagcgtcagaatattgacgacgaacgccttcttttaattcgatttcggcaacgatctgcttaacggtatgatccttattgtatttaggagccgcaacgccataacggacaaacttgttcttagttaagtagaaattgatttcttcaagctcgattctgtagccgttgaacttgatttggaagtcaattcgaccgcggtaaaatagcatatcgccatcaaagaaaccagcatccccactccggtagctacgatactcagcaccatcttcatggaaaaaggcagcttcagtcttttcaggattgttcatatatcctttagaaacactaggaccactaatgataatttcaccttcgccaggcttatcacccttagaagtatcaattgtaatcttagtgtcttcttttatcttaccgattggcaaacggtcatactttttaagaacttcatcagtaatttcaacttgagtaacagcaactgttgtttcagttggaccataggtgttgaaaatatgactatctgggaacttcttcttaagcatctcagcttcactgtgtggcaattcttcaccacagaacaagaaatgacttaagtctggatggtgttctgcatcaaaagtcttgtccaagaagcacatctgtgcaaatgacggagttgatacccaaacattgaactgcatctttggcaaagtttggaataatttaccaaagttttgagtaacatcatgaggcaaaactaccaacttaccagcagaaacaagtgctggataaagactcattactgacaaatcaaatgagtaaggtgcttgtgccaagaaacttggatgttctggcaaattaaagtctgacaactcccagttaacgaaactaagcaaattgtcgtggctaatttgcacacccttaggcttaccagtggtacctgatgtaaagataatgtagtagttgtcatcaccttcaacgaagttcttctcgtcaacttcaaaattgccgtcttcaacttcgctagccttaagaaccttaacatcagttaaatcaacctctggcaatggatcaatttccaaaactagcggtgacttagaaacgtcttgaatcatcgttaaacgttctgcattagaatagctagcaattggaatataagcgtgacctgacttaacacaaccaagaaaactagcaatcatttcaaaagtttgtccgccccaaatcataattggagcatgctctggaatatctaagctagcaattttacgtgcccacgcatttgaacgctttttaaggtcaccatatgtattagtttcaccgagatagtcgtaaacaacacgatctggttcgtttgcggcgatctcatcaattttcttaataacatcttgaatcatgtgatagcacctaccttaaaattcattataaatgaagtgaacagatgttagtccactatattcatataaatagataagagccatcaggattccgaaataaacaattgttttcaaaacaaacataccaatacgtttgcctcgagaatcaaccttcgtctttttattcattttttctcccttaggtaatcttacttttgcctttgccctatattactacaaatagtggcaacaaacgcactaacggcttatattttaacaaatttaaactttttcttaaatcttcagttatttgtttcaaattgcgaatgcgttttctttactgttgtctcttgcaatcccgataagcaaaaaataatggaataaagataactattgccacaaaaatcaaagcaaagatcattaagcgccatacattctgtggtttagtccacattttactctttgccgtcgccaacaaaaatgccgcaaataaagcaataacaattacttcaaccaggcaaaaaattaaatgagtattttgccagagatataagtaggttgttgccggaaataaacaaaaccaccctgaaaagcgtaaaagaaagatttcttttttacgataatctactttcattatagtttcctttccccattaactgccaaataacgcattaatattcaccgacaaaatccggtccataactacaatttctggtctggcgtagatcttagagcctgattcaaacacacatagtagttgtcccttataagcggtaatttgctctaaatatggcggcatggtaattaccagttctgcattcttttcgtctaaagcatttaaagctgaagttggaaaaacgtagagcttggaatcaccactaccataagattggctcaaaaaaattttattttggtaaattgcaattccttgaatttgcttatccattgaagtttcgccagttggatcggaccattgcagcgttccggtaacagatttaacttcattattagtaattgagccacgatttttaccactacgcgctatagtgtaagccgcaacttttcctcgaccatacatgttaaaaaagccaacaaacaattgaccatcataatatgtaacggtcgatgctttttcaactgcaggaatggcaatttgatatttatacttaattggtatttggctgccctctttataggcccttaattctgccattgaaaatgctgctagcgctgaagatttgcccattgagccagttatccagatatttttggctactggatcataagcaatcccacctaggtgtggccgaccaggtatttgaatcgttttaagatatttgcctgtcttcttatctaagacataaacaaccgaagcatgctcatgttcaccatcataagcagttagcaaaatatacttacctgcaaccgtaatcccctgtggtgtcattgcagttgctgtattgacctttttagttttaaaatcataacttttagtagcaactaatcccggcaaaacaaagtcttttccatcccacgtccgcggtggtacataattggcaactttattaataaaaggatatttttcacgcaatgctttttggtaattggcaaaattatgccaagcaggactagtgcttgtcccatccttagcaattttttcttttggccgttgacggatcatctcctgcttctgccaccattggtaaccgaaatagcctcctgcaccaatccctgcaagcaaaagcagtactagcaggaagcgcaaaattcttttaccaatttttttcaaaaaattactcccttctgtttaggaattgtccctattatgcaattcattataacgaaaaaacaattactttttgtttttaactccttgctataagctttatttactaaaaagataaatttttttgcaaaaaagtgctttcgtcacacttttttcacaaattaaggttatactagtaaatgtagtgaggaagaataatcctctactacaactcaacttttttgtttttcattcatactcctccaagtaaataatgaaaataaaaagaattgacttactccaattagtcaatttcatatctatccctttcggctcacgtgcgttgcgtgagcttttcttataccttaacttattctcaagcaaatctttaccttttcataataaattgaacacttttacttcacatttacccagtattatataaaccgtagcaagatggtagaaacttgctacaatactcccacttttttatttcattcattcttactcctccaaagtagatgaaactaataaggtccgcaaaaacttgcgggccttttcctttttcagcacttttttctgtataattaaggtagaaatgaggtgccgctatgttttcaccatcaatcaaacatttaatagaagaaaaatctggttcatttttaatccctgctagccgaattgcctttgtccaagcagacaatcctctttatcatgcctttttgattttgactaaggttaaatattcaaaaattccagttttagataaagaaaaacgagtcgttggcctgcttagtttggaaatgattacggacaagatgctgacgactgatgagatctccactgcccctttagataaattaaaggtcgaagatgtaatgcaaactaagtttgataaaataaacttcgttgaaaccaccctagaaacgcaactgcatctgttaatcaataatgctttcttgcccgttgttgatgatcgcggcgtgtttcagggactacttactagacgcgaatggattaaggcatttaactatgtagttcacacttatgacaaacactacgaaacaaaacgaataaaataacctccaagcagcctttaaggctgctttttttaactccaacatttattgagcaaaaatgtgtccagaccaataaagaatgttagaattaagcggtagacagatatgtttgtattttggggagggcaattatgaaaaatttaaaacgtcaatggaagtttattgtcgttttgattgctggtgcagttggattaattagccaatttgcattgcattcaaagagcctcttctcaatcggaaatcttcaatttccagttcatgccatcattattgatatcattggtatcttgatggcaatttctttactattggaaattttccacgattggaagccaggccgttacggcgtagacatcctggctgttatcgctgttgtttctaccatattgattggtgatgtatgggctgaatggatgattttggtaatgatgaccggtggtgaaacgctggaagattacgcaactggtcaagccaacaaggaattacgtgccttgcttgataaaacgccacgtatcgccaacaagttagttgacgggaagatcaccgaagttaaggttgatgacctgcaggtcggtgatactgttttgatcaagccaggtcaacaagttcctgtcgatggtcaaatcgttaagggcacttcaagcttcgaccaatcttcattaactggtgaatcagttcctgtgaccaagaaccctggcgacgacttaatgtccggttcagtgaacggtgatgtagcggtagagatgaagttaactaaggctgctaaggactcagaatatcagtctattgttgcgttagttaagtcttcacaagctcaacctgctaagttcgttaagatggctgaccgttacgccattccgtttaccgttatatctttaattattggtggtgtcgcttgggctgtgtctggggatgcaactcgctttgcggaagttatggttgttgcttctccatgtccactgttgatcgctgctcctgttgctttggtatcagggatgagttcaatgtcagctcaccatattattgttaagtctggtccaaccctagagaagttggctcgcgctaagacctttgcttttgataagactggtactttgactgaaaaccaattgatcgttgaccaagtcgttactgatgacaaatcatttgatcaaaaagaattgcaaagcttagctgccagtgttgaacaacagtcaagtcacgttatcgctagttctctagttaaggctactgacaaggatttaattcatcccgtaactaaccttaaggaaactactgctcaaggtgttgaaggtgatattgatggcaaacatgttaaggttggtaagttatactttgttgcccctgatcatgaaaaattaaacgttacatcaaccgctgtttatgtatcagttgacggcaagtttgcaggctacattactttgaaagacaagatgcgtcctgaaagtcctgagactatcgctcgtcttcgtcgtcaaggtgccgaggacatcatgatgcttaccggtgaccacaagcaagttgctgaaaaagttgctaaagaagctggtattactgatgttcgctcagaactcttgccatcacaaaagattcaagctattaaagatgtgccaaaagacttacgtcctgtcgtcatgactggtgatggcgtcaacgacgctcctagtttaactgcagctgacgttggcattgccatgggtgctaaaggtgctactgctgccagtgaaagtgccgatgctgttatcatggttaacgatatttctaaagttaacgatgcagtcgctatttctaaacacacaatgaaggttgctaatatcgatgttttaactgcaattggtgtcgttattatcattgaattgattgccttcactggtgttatcccagccttctggggcgctattttgcaagaagtagtcgacatgattacgatcagcttaggtttacttgctaagactaagccaagtgataagcaatttggtttggaagaaaaatagattagatgtgaagaagctccagaatcgatttggttctggagccttttttcatacataattatgcgtagcactgcactagttcaatttgcatctaagttaaaaaactattaagattaaactcaactaaataatttttagtggttgggtttttatcacaataaaaactttcaagattcgcttctttgggtcaggaagcacttgaaagttttttgtttttttacagaaggggaaaatatgcattttttaggacaacttatcttaatcctcttaactacagttttgctggggcaattattcgcccgcttcaatatgcctgcagttattggacaactattatcaggaattttactgggaccagctatcttaaattgggttaagccaaatgatatcatcagtctattctccgagttcggggttattctgctgatgttcttagctgggcttgagagcgatctagatttattaaaaaaatacttcaagctaagctttactgtcgccacagtcggcgttatcctacccgtggttttcatgggcttagccagttacttctttggcatgcgccctcttgaagcactctttatcgggattgtctttgcagcaactagcgtttctatctccgttgtggtgctgcaagaagcacaccaactgcacacccgtgccggcacagccattttaggtgctgccgtagttgacgatatcttagccgtggttgttctgagtctattcactacattcagtcatgaaggtggcaagagcggcttaactaataactttttgcttaatatcttgattgaagtagtttacttcgtagttgtttggctgatttttaaatttgttgcgccatactttatgaaagcttctgaaaaaatcgacgttgactattccgtcgttatcggttcattggttttagccttaaccatggcttgggccgctgattttgttggtctttcagctgttgttggggcatttttcggtggtttagcaattcgtcaaacaccacaatacaaagaagttcactcttctgtttccgcaatcggctactctgtcttcatccccgtcttcttcgctgatatcggtctttcaatgacttttgccagctttttcaaggatatctggttcattatcgttatgaccgttttagctattttatcaaaattctgggccggaaaatactccagcgaaatctttggcttcaataagaatgaaggcaatatcgtcggtgctggaatggtatcacgtggtgaagttgcactgattgtagcgcaaatcggaattaaccaccatctcttccctgaggatatttattcaagtctgatcctagtaattatcgttacaacagttatttcaccatttattttgaattactttattaaaaagagtcaaaatagtacggaatttatgtagaaaaagtctagcattcgctagattttttaatagtttaattttacaaatggcttatcatagacgcaattgtgtctacatggtaaaaccaatagtgagaggtgagaaatatgttacaaactccaaataatatcagagctgttaccgctcgtgacctgcgcaataattttaaaaaaattgctgatgatattaatgactatgatactaccgttatagtagctcgtcccaaagataaaaatgttgtgattatttctcaaaaagaatacgattcatggcaagaaacttcatatcttctaggaactaaagctaaccgcgatgcattagctgaagctaaacaatcatttgaaaaccaagatcaacgaaataaagttttaaccccagaagaattcgaggctttaactcaaaatgacgaagcttaacgttaatttttactacaatgtgtggaatgaatatcttgaatggaaaaaagaagataaggaaactttcaaaaagattgataattttatcaaagagtgccaacgacatccttttactgggaaaggaaaacctgagccgctaaaagcaaatttaagtggtgaatggtctcgacaaattaatcataaagatcgcatggtttattcagttaccgcaacagaattacaaatatggcagttaaaataccattattccaaatgaaaaagctctttcgagcttttttgtttaacccaattttcctaaatcgatcacttggtcatacttctgcaactcatttgattcatagtggtgaattacttcaataaaggtaaggtttgagtttaacaagtaattatgaatttgatctgatgtcttcttatcaagggatgcattaatttcatctagtagcaaaatcgatctatcggccaaaattgcccgtgctagttcgattctagctagctgtcccccagacaattgatccgcattatcacccaaggaatagtcccagcccttttcagcaataatttgatccaagcctaatttttggcacacctcgctcaccttttcccgggaaatatttgcacctaaagtgagattaaaccacaaggtatctgcaaaaattactggagattggctagcataagcgaataaatctgtaaacgagcctggcttttgctttttgtcgttaagcaatatttccttagcatgaccatgttttccagtcaataaaaattgtaataatgttgatttacccacaccagatggtccaataactgcaaccttttgaccttttacaactgcaaagttaatttgattagctaattctttaccttttctagtaagattaagatcttctacttgaatttttgcaaaattataattggtctctttcttttcaaccttgcccttggcaatatatttttctgccttagcgacaattttcttagttgttgataatttgtttcgatcttctaaaatagtcaaaattggattaagaaatgaatttgacagttgaacgattgcaaataaggcacctaaagtagtttgacccttaaccaccatgtaaattcccactaagaatggggttaagaacgtaaataaactagcaatcaagttaatccaagaactagtatctagattgagtaagttcattttacgcaaagcatcttctaattgattgatcaaaacttgatttttcttaaccgcattatcacgcttgttgtataaatttaatgttgtgctaccagccagaaagtttttaatatgactaacatatttatcattagcagttgtccaattttctgctgcagtttgaatcttcttttgaaataaattagaaaccagcatcggcaaacatgaaccgattaaaaataataatgtaactaaccaattaacacataaagcataccctagcgcaaagacaatcatataggcctgcatcattatttcaatttcggcatcaaaacgattagtttccagcagtttaaaatctgtagttaaaaagcctaagctagcagtattttcttcgctagtctgacccagcatcccctttaaaattccagctcgcagcgtcgtattagtctcttgaatagcacttgtttttaaccgattgaaaatcagcgaagcaataaaagtcgcaataaacgccccaataacaataactagaaattgtgctaaatcgccaaaccttctttgcgtaccaacattggtcaatgtctgtaccatatatgcaaaaatgatttgttgtgtactagcaatcaagcctaaaatagttaacataatgaattttgcatgtgaagaatatttgtaaatcattttttgtcctcctgtattttacttgaggctagtatcgcaggataatgacgaaaaatgttagaaatttacagatctgcaaatcgaggtaaaacattatgttcaaatatggttcaatttacaaacaattgcgcaaagatcaagaaatcactcaaactgaagcctgcaagggtatttgttcaatctccaagttatcacgctgggaaaacaatcaggtagaagttgagtttagcaccgccattgcattactcaggcgcatcaacattacgcttgacgaattcacgcattacgctgcaatgaaaacagaatttacattgccagacgacattataacggccattaaagacaatgatacaaaggtactcgaaaaatttgttcaggagcagctaaatcattatcacgccaccaaaaatattctcgaactcaaaaacatcattcttgtctgcaatcaattatttctcatgactggtaaaaactatctaacacctgcagacattaatcgaatcggttcatacctgcttcacaacaccgtttggtctaaatacaatatcttgctttttgctaactcaccgtttttgctaaattctaaaatcggctatcaaattgctctgcgaattattcacaattttcaccctacagaaagtttaaacgaaaatactactattttcatgggcggtttatctgatacagttattgccttagttttcaaaaagaagctagattacgctccaaaaattcttaatgaattaaaaaagatagaacttcccttctatctcatgttctttagtttaacattgacccttttacaaaaaattatcgactactgccacactctcaacgcacagcctgtattggcaatgattgataccatagttcagctgaattgcatggaagttgctcaaaaatggcttgagatttttaaagacgtacaacaaatctggccagaaaaagaaaattaaaaaccgtaaaagtaatttactttcacggcttttgacatagtattcattatgcaagcttacaaatttttagcttttaattaatccttaacaacgtctttggtgttcaaccattgactcttgttgatcttaacgatcttcttgccagcagctttcttaacatccttagcggtgtaagttgaacccattgaaaccttttggctagtcttgtgaccttgtgcgtccaaaacattaactttttggttcttagtgtcctttacagtaacaaagatcttgtcaccctttttaattgcaggatcagttggcatagtttcggcaacacctaactttggagcagtaaaactagctgcttgactaactgaagcaccaacacccattaaactcattgaagcaactgcgattgaaacaactttaactaaattctttgaaactaacataatgaatacctctaatttctatatcacttaacttgttggaactttttgttccctcattccttacatctttattgtataacatatgttattaattgcaaggggtttatcgaattttttaaaaataattcagtcgtctcaaagtgttgctataataacgattgcggggattttttgtccaaaagcattaaaaaagtgtctgagaaaccgttctttcccaaacacttttttaagcagctgctacttcgtttgaattttgagtcacttttctagtttttaaactgacaaaaatcgctacaattaatgtcattacctggattactaataatgtaaccaaagcaacagtaacattgaatgaaccagaaattgtggttaatactgttgtcataattggagcaacagccattaagattgtatttaataagccaacagttgaagccaagattttatgatcaactgatgttactagccattgctccattttaattgaagcaactcctgcaatagctgccaagaaaaacattgttatcataattacgtaagtatttcctaggaaaatgcttgttgtagtaacaatacttaaactggcagaaataattactaaactaaaaactgttaattttttgaataattgtggtccaaacattgaacccaatgcaaagcctgcgccagtaaccacaccaaacaaagcaatagtaaagctataagtgccgattagcatagttgaacgatgagctgcaagtacaattgttgtcaatggagtaattgtatctaaagctccatttaataatgcgattactaataccacagtcaataatcctgattgtttcttcacttgggtcaatgaagttttcattgtttggaaaaagttttgatcattaacttcctgtttttcaagtggcttctgattcttctgatgttttaagccaacactggcaaataacaaacctgctaacaagaaagtacctgcattaacaaaggctaaagttgagtatgacattactagcaaaagtgctgaaccaatgaattgagcacccatactaataatttgatttacgccgccattaaagcctactgcattcccgtattcttttttaccaacaatatcaacaattaatggtgcaaccaagccacctgaatatgaaccaatagtatctgataagaaattcacaacaacgatgcttaaaaccaaattccactgtgacattttagtgataaacaataatcctactaaaccatataagatgaatcggacaaatgctgctaaaaagatattgcgaaactttttcttagtcttatcagcaaggtaaccaccaaagatctcgaataattttggaactgattcagaaattgcaattaatgaaagtgctaatgagtagttttgtaatttgctagcataagtcatgaaagccaagtagaaaagaatatcgcctgcgcctgaaagaaaactagctactgaaaatcttctaaagtctgcgtttttaagaaatacgttcataaatcttaccccctttttctttgtttcgtttgttgttgaaattataataaagtgaaaaagaaattaattttaaaaatggcgtattcgacattcggaggataaacctatgacaattggtgaattactcaaagaaaaaagactagcagaaaacaaaactcaaaaagcatgggttggtcatattatcagtacttcttattatgctaaagttgaaaagaatattcatagaattacagcagaggatttattagccattcttaaacataatgatctttcaattactgactttttcgaagaattagcagacaaaaaggatgaactaaaagcacaagtaaactcgctaaataaaacagtaattgatgctgtttatcattctgatgtttccaaagttaatgaagtcattcaaattattaaaaaaatggatctaccgactaagcaaaaacaagaacttatcttaatcaataaggggtttatcgaaactatcaaaaatgatctaagtgacaattatcagccagataaaaacatcgttcaacaactaaaagacaaaatttttagtattcctaattttaatagattcaaacttgaactctatactaatttcatgcaattttatgattatacaactaatattatgatcaccaaacaagtgatccataaaatagatcagtttaagagcgataaagagttattagcaatcgctggtattctattcaatctcctttcacaattagtcgaagaacatcattatcaagaaactgcaccatttatagcagctagtgagcatttaccctttttaccagacttatactttcctcaaaccggaatctcattgctaaaataccttattagttatcattttaataaaaaaacagcagacttagctaaagctgagatgattgcacaaacttatcaaattactggtctagaagactttggtaaaggtgcacaagaaattattaatgaagttaaagaggactagctttaagctaatcctcttgtttcaatctctaaataaaacctaacgcgttatagcacatgtgcaccaaaattgaatagcgcaaatctttggttgacatatagacccaagctaaaaccatgcctaagacccaatataataagatatacttacttaatgccggatcatgcatatagccaaataaaaatccgcttgcaacaatacctagccacttatttctagtatttttcttagtgaaaaagatattgaaaaacatccctctaaagatatgttcctcacaaaatggcgcgatgaaaactactaggatcctaaataaacctgcattgtattccgctattttattcaagctttcctggttctttgaaacgccgccaccaactagattaagcatcacaatcgaacctactacaatcagtacaaaaccgatcatcgctattccgattctgcgccagtcccagtgtggtgtttcatcaaagccccaatcattttcttcttttaattgcctgcgataaatataggaaattgcaaacaaaactattaccgtagcaagcgccgtaacgaagacgcgatattgcgccaaatcaaatcgctgaggtctaaagtaaagtacttctaattcagaataaattaccaaagccaacacagcccctgcaatatttcccaggtaatgtccaaatctcttcatttttcattcacaccttgattctttcaactagtaatcattgtttctattataatgtaaataagaaaaaatacctaaggaggagtatctatctatgcttaatcagatcatcgcttttttggggagacgcggtgagttcttctacatttcagtctttatgttactgatattttttgcctttttaatctcttggcttatcgaaccaagacgtttgattaatggcgttttgtttactatctttatagtctcaatgctctcttggatcaccgttatggtgcacaaaagtacgagtcacggcttgcaacgtgcctatgacctactagttctagctgcattatttggcattgtcttattattaattttcgcctggatttttctattctggaatgcctatttcgtttggaaatatgaaagccatactttgcctaacttgcttactttaattaccggatttttagcattaattattagtattatcgtgctcttaggaccaggtaagtacttgccacgttggcttagtctcgcattagcttcaattcccgcgattgcaatttatttgggattggtgctttacaactttttggtaaacttgcttctatatcaaatttatcctcgtacctaccaccaagactatttaatcgttctagggtctgggctaatcaatggcgaccaagtatcaaaactgcttgcggctagaattaatcgggcaattcaatactctaaccgccagtatcaaaagggccgcaagcgccctatcctgatcatgtcaggtggtcaaggcgctgacgaaaaaatctctgaagcactcgctatgtctcgttttgcacaacggcgtggcgttagtgttgaccgtatcttattagaagatcaatcgaaaaacacatacgaaaacatgctcttttctaagcgtattgccacaaaagattttggtaattcccacttcagggcacgcttctttagcaataattaccatatttttagagctgctctcttggctaaggaagttggtttaaaagccaatggtgtcggtgcttacaccagattctactacttgcctaacgcaattatccgcgaatttgccggtgtgtttgtcatgcataaacgccgtcatttcgttatcatgggattaatcgttttattctttatcctgcaagctatcttagtcatgacaggattagaaagatttactgtaatttagaaaagagggatgcaatgcttcaactaaagcatatttttaagtcatataaggtgggggacaacatcacccacgctttagacgacgttacaatctcgttccgtgaccaggaattcgtcgctatcttaggtcctagtggttctggaaaaactaccatgttaaacgtaattggcggacttgaccgttacgaccaaggtgacttgatcatcaacggcaaatctaccaagaattttaaagagaccgactgggatgcttaccgcaacaataccgttggttttgtttttcaaaattataatctaatcccccacttgtcgatcatcgccaatgtggaactagggatgaatttgtctggtgtgcctaaaaaacagcgccatgaaaaagcaattgcggcgttaacagaagtgggattgaaagaccatctaaataaacgtcctaaccagttgtctggcggtcagatgcaacgagtagcgattgctcgagcaattgccaacgaccctgatattctactttgtgatgaaccaactggtgcacttgatactgagacttctgtccaaattatgaagttgatcaaaaaactatctaaagatcgactcgttattatggtgacccacaatcctgaattagctaaagaatacgccacaagaatcgttaatttccaagacggtaagattcgtcatgattctgatccttttagccctaataaggaagaagacaaatttaacctcaagcgtaccaagatgtcttactggaacgccatcaagttgagtttcaccaatattatgacaaaaaaaggtcgaactctgctaactgcttttgcttcaagcatcgggattatctcaattgccgtagttttagctatctctaatggttttcaaaagcaaatcaataccacaatgagcaaagctttagcaaaatatccgatttctatttcacagaccgcaactgacattacttcagctaatgcacgtaaagaatcggataaaaatgtcaaaaaccgcggctatgtaacggcagaacaagaccaaagcgaacaggcccaacacgttaataaaattagcacaaagtatgttaactacatcaagaagatcaatcctaattatgccaataacgtgtcttaccaacgcggcgtaagcttgaatttattagctaaaaacaagggaaaaattgaacgcgtgcaattttcaaatacggatcctgatcagactaattctgttctagctgctagatcccaagcgatgagttcaatgggactgggttcaagtgtctttcccactactttaaataaagagaaagactcatttttgaagcaaaactatcaattgctctcaggcacttggcctactaaggcaaccgacttggttttagttactgacaataaaaatactgttaacatcaatgccttaaaaaatcttggtttcgatttaaagaataaggaacacgtcaaattcggccaattagtaaataagcaatttcgtgtagttgctaacaatgattactatcagcaattgccaactggcatgtttattcctaaaaaggtaaataacgccatgtataacggtgctcaaaccaagctaaagattgctggtgtcattcgtcctaaaaacgaagattcaatggccttgttatcaactggaattgcttatagcgatcaactttcacaacgcgtgattaatgaaaataaaaactctgcaattgtaaaggcacaaaagaagagtaaccatagcgtattaactaaccaaaaactaaatgccaatgaaaagaaagctacaatgcagactcttggcggtaccagcatccctactggtatcatgatttatcccaacaattttgatgataaagataaagtacttgattatcttgacaaatggaacaaggggaagaaaaaatcagacaagattctctatactgacatgtcaaacgctgttaccacaatgactggcggcctcttaagcgggataacgaccatccttgtcgcatttgctggtatttcattaatcacatctatgattatgattggtattttaacttatacctcagtacttgagcgaactaaagaaatcggggtactcaaggcattaggtgcccgtaaaaaagacattactcgtgtctttgatgccgaaaccttcatcctaggtgttttctctggtgtattaggcattctgattgcttacctactaacattcccaattaacagtatcatttacaagattactgatctggcaaatgtagcccaactagatcctactgctgctattgttttgatcattatttcaactatcctcaccctcttaggtggtcatattccagcacgaatggctgcaaagaaagatgctgcaattgcattgcggagtgaatgaatttaataaagaatttgttacgttgttcacaataacctaaatttttagcaaaatatgtggtatcttagctttagcaaaaacaagtaagaaaggaacttttttcaccatgactgttaaaaaattagaaaataacagcgatgttaatgtagtggcagaagaaagcaaagttttaactgatttattgaatgaatcaactaagcaagtaatcggtcaagcagctttcgataagatccaaaacttaattaaaatctctgccgccaaagattatcaagaacttgaaaagcaaattgctagtcttaacaatcgcgaaatgattgttgttgcacgttattttgctactctcccactcttgatcaacatttcagaggatgtagaactagcaagtaaagttaatgtgcttaacaatactcatcaagattatctaggtaaattgagtgacacaattgacattgtagcccaaaagaaaaatgccgaagaaatccttgaacatgtaaatgtagtacccgttttaactgcccatcctactcaggtacaaagaaaaaccattttggaattaaccgatcaaattcatcaacttttgcgcaattatcgtgatgtgaagaatggcacaattgatcgcgatgaatggactgaacaaatgcgggcttgcattgaaattttgatgcaaactgacattattcgtggtcacaaattaaaggtagctaatgaaattaccaatgttttggcttactaccctaaggctttaatccctgcaatcaccaaatttactagtcgttacaaggaattagctaaaaaacacgggctaaacgctagtcatgctacgccaattaccatgggaatgtggatcggcggcgaccgtgacggtaacccttatgtaacggctgatacgctagaactaagcgctactttgcaaagccaagtaatctttgaatattacattaagcaaatcaataagctttatagagccatttccatgtctacttcttatatggagccatctgacgatgtaatgcacctatctgagctttctaatgatgattcaccattcagaactaacgagccatatagacgggcattctactatattcaaagccgtttagtgcacactgaacaaaaattactgaatattactaacaagaacactttcttaaagaaacgtgacctccaaaatcttgataaaatcccttgttatcaaaatgctcaagaatttaaagccgacttagaaatcatcaaaaattcacttgaagaagaccatgatcacgccgtagtagacagctactttactcaaattcttgaggctatcaacatcttcggcttccatctagctacaattgatatgcgtcaagattctagcgttaacgaggcctgtgtcgctgagctacttaagagtgctggaatttgtgacaattatagcgatttaagcgaagacaaaaagatcaagcttttactcaacgaattgaacaatgatccacgtaacttacacgccaataacaaacccaagtctgagttactacaaaaagaattaaagatctacaagactgctcgtcaattgaaagaccgtttgggtgaagacgtcatcaagcaacatattatttctcacactgagagtgtttcagacatgctagaacaagcaatcatgttaaaggaatacgatttacttgataatcaaaaagcccgaattcaagtggtaccactatttgaaacggttgaagacttgaataatgcccgggaaataattaaggaattcttaagctttgatatcgtcaagaagtggcttgtttctcaaaataattatcaagaagttatgttaggctactcagattccaataaggacggtggctacttagcttcatgctggaacctttataaagctcaaaaggatctaactaagattggtgaagaaatgggtatcaagattacctttatgcatggccgtggcggtaccgttggtcgtggtggtagtccatcatacgaagcaattacagcacagccattcaagtcaattaacgatcggatgcggatgaccgagcaaggtgaaattatccaaaacaagtatggtaataaagacaccgcctactacaacctagaaatgttagcttcagcaacaatcgatcgaatggcttctaagcaaattgttagcgaagatcatgtcgcagatttccgttcttcaatggatcaaatcgtagctaaaagcaacgaagtttaccggaaactagtatttgagaatcctaacttccttaagtacttcttccaagcaactccaatcaaagaaatctctggtcttaacgtaggttcacgtccagcttcaagaaagaaactcactgacttttctggcttaagagccatcccttgggttttctcttggtcacaaagccgtgtaatgttccctggttggtatggcgtaggttctggtttcaagtcatttatcgatgctgatccagccaacttgaaggaattacaaaatatgtaccaaggttggccattcttccactccctgctttccaatgttgatatggttttatctaaatcaaatatgagaattgccaagcagtatgcggatctttgcgaagatgaacaagttaaatcagtctttgatatcatcaatcaagaatgggaactaactaagaaagtcatcctacaaattgaaggtcatgatgaattaatcgaagatgcacctactcttaagaagagtctggaatacagaatgccttacttcaacattttgaactacatccaattagaaatgatcaagcgtgatcgtgaagatgtgattcaaggtgtttaccaaagtattattccaattactatcaacggtgtggcttccggtttacgtaattcaggataaaaaacacataaaattcagctaaaaaaggctcctcattgcctgttttatcaagcatttgaggagcttttttttaatttattaaactttttagttacgcctttttcataactaagttaagtggcgttacaattactgaaacgacaatggctgtaaaaattgcttctactaaaccgttcatgcccagtgccataattaaaattaaaatcaatggcgtacctgaactataatttcctaggtaatgagttaagcttgctggatcatgcatgaagaaaatactcgtcagcaaaataaccatcacggtattagttaacgaagtgactgctccacttatgatataacccaatttcgcatatttagtcttactcatacccttcgcaataattcccgggaaatagccagccaaaatacttggtaccaatgaaattaccggattttggaacaacattaagctgaccatatcgccaggttgagtatatgcaacaatcaatctggtaataccccagaataagccaaagcctagacccgccttttgtcccattaacgtgccatagacggcaattgtcattggaatagtagttacagctggcaaagccgggataattcttacatagccaacatttggcacaaaagtctgtacaatcaataaagcagcaaagacagcagtaattgctaatcttttagtttcttctcttctcatatatttctccaacttaattctttagactcaattaaaccataattaagattttttctcagcaaaaaagtttattatacaatatctaggtatattttatctaatatgacaagatattgtattttttattatttttttacttaattatgcattatccttactctctctaatgcataatcgtgttctataccaattaagaatccctttatatcaatactttatgttgtatgtcaattttgacatagccactaaatattgttaatctcgttttgtgttaaaaatcatttgatggagagaggatcaattttatgaataaaaaagtcaaaaaattactatctattggtgtgcttgcattgagtttaggtgcaattttaaccgcctgctctggtaaaaaacagggtgcaagcaataataaatcaagcgatgccaagcactctattgcattaattactggcggtaatggtgtaaatgataactcttttaaccaatctgcttgggaaggatttcaaagttatggcaaagagcacaacttgagccgcggtcgaaacggttatcaatattttcaatcaagtagtgctgctgatttcactcctaattttgatcaggcagctaaagctggttatcaaactatctttggcgttggttacagtttaaaagatgccgtagcttctgccgccaaacgctatcctaaaaagaattttgccattattgacgatgtaatcaagggacaaaagaatgttgtctcagctaatttcaagagcgaacaagcttcctacttggctggtgtcgtagctgctaaagaaaccaaaaccaacacggttggcttcatcggcggtgctcatggcgatattgtcgacctttttgatgccggatttactcaaggtgttaaagatcaagccaaaaaaatgcacaaaaaagttactatcttaaaccaatatattggcaactttactagttcagacaaggccaaatcaattgctcaatcaatgtacaccaaaaaagccgacatcatcttccatgctgctggtggtgctggtgatggtcttttccaagaagctaaagccattaatcaaactagaccagctaaagataaagtgtgggtaatcggagttgatgtcgatcaatctcatctcggtaactacactgctaaaggtgggcaaaaatctaattttgttttgacatcagtaataactggagtaaatgttgctgtcaaagatatcgccaatagagcttataataataaattccctggtggcaagaatttggtttatggacttaaaaacaatggtgtttctattgaacgaggacagatttcagcttcaacttggaaagatgcccaaattgctagagctaatatcctaaaaggcaaaattaaggttgccattcatcctaacaataaataaaagcatactagtatagtttgctttttataattacaatcaattattttttgcctgatcaatatttttgttgacaaaataccgaacaattaataaacttatttataaattgttcggtattaatattgtggaggacagaaataatgaacgtaaagttcaagaaaattttatcatttggtgtcgttttagcatcagttggcttgattctaactgcttgttcgggtaaaaagtctggtcaatcagccaacaaagatactaaacatggcattgccctaatcacagatgaaaatggtgttgatgatcattcatttaaccaagctgcatggtcaggatttaaagcatacggcaaggaacatggtttaaaacaaggaaaaggtggttatcaatacttccagtctagcagtgccgcagacttcactcctaactttgatcaagccgctacagccggctaccaaaccattttcggtgttggctatcaattagccgacgcagtcaagcaagcagccaagaagaatcctaaaaagaatttcgttatcattgatagcgttgactctgggattaagaacgtcgcttctgcaacctttgaaagcaatcaagcttcttatcttggcggattggccgcagcttacaccactaaaaccaacaaagtaggtttcattggcggtgctaagtcatctattattgatttattcgaagccggttttaagcaaggtgttgctgacggtgctaaagctcttcacaagaagatttcagttcaaacccaatacatcggtaacttcacttcaaccgataaggctaaatcaatcgctcaatcaatgtatgctaaccgcgctgatattatttaccaagcagccggtaacgcaggtaacggtgttttccaagaaggaaaagattacaaccaagcccgtccagcagctaaaaaggtttgggtaatcggagttgacgttgaccaatctaacctaggtaactacaagtcaaaagatggtaagaaagagaacttccctttaacttccgtcttaaagggcttagatgttgctactaagtcaattgctaatgatgcttacaatggtaaattccctggtggtaagcacttagtttacagcttaaagggtaatggggtttaaatcaccaaaggtaatttaaacgctaaaacttgggcagcagtacaaaaggctcgtcaacaaattattgatggcaagatcaaggttgctactgctccaactaagtaattcagctgcttagtattttgagaactcttcgttttttagcgaagagtttttctatagttaattaaggaagtatttatttacatgaaagaacagagaaataaagtaatcgagatgcgtcatattgtcaaagatttcgatggtttcaaggcaaatgacgatattaaccttacgctctatcaaggtgaaattttggctttgcttggtgaaaatggcgcgggtaaatctaccttaatgagaattttatccggcttgcttgaaccaacaagcggtgaaattctggttaataatcaaaaagtaaatattaaagatccaaccgtcgctaaaaagttaggcattgggatggtacaccagcacttcatgcttatggactcatttaccgttttagaaaatattattctaggacatgaatcaactaaaggaccagttatcgatctgaaaaaggcaagaaaacaggtcctagctcttgcacaaaaatatggctttgctattaatccagatgccaaaatctctagcattactgtcgcccaacagcaaagagttgaaattctaaaggtactttatcgtggtgcagatattttaatttttgatgaaccaactgctgttttaaccccacaagaaatttctgaatttattaaagtactcaaaaatttagctaaagaaggcaaatcaatcattttgatcactcataaattagaagaaatcaaggctgttgcagatcgagttacagttatcagacgtggtcacgatgttggtacttttgctgttgatcaagttagtgatgagcggttagccgaattaatggtggggcggcatgtcaacatgaagctaaccaaaccagcacctaacttgggcaagcaaattctagcaatcaaaaacttacaggtaaaaggaaatcacggtgccttaagcgttaaagacctttccctttcaatccgtggaggcgaaattttagggctagccggaattgacggcaatggacaagatgaactggttgaagcaatcactggtttacgccatgttaagtcggggcaaatcttaattgatagtcaaaatttaaccaaccaaaaagttcgcaaaatcaccgaagctggcgtagcgcatattcctgcagaccggcaaaaatatggtttaattcttcacatgtcattagctgacaacttagcgctgcaaacttactaccaacgtcccttctctaatcatggcatcattaatcatcaagcaattttgaagcatgccgtagatttaattaaaaaattcgatattcgaactactagccctgcattgccagctagcgacttatcgggaggtaaccagcaaaaagcaattatcgctagagaattaaatagaaacagcgatctaatcattgcattccagcccactcgcggtttagatgttggtgcaattgagtatattcataagcagcttttagctcaaagagcagcaggaaaagctatcctattaatttcatatgaacttgatgaaattatgcaattatctgaccggattgctgttttgcatgatggtcaaatttcaggcgaagtattacctgaaaaaactacagatcaagaactaggtcttttaatgaccggtgttaagaaagaagatgcaacaattgattaaagttacacctaaagtcaaaaatattctagtaccagttatctcagtaattgctggttttatagttggtgcaattatcatgctgatttggagttataatccttttcaagcatacagctccatgttctctagcgcactgggcaatatgaatggtattggtgaaactattcgtgaagctacgccattaatttttattgctatcggttttgcaattgcctcaaaagctggcttttttaacatcggtttgccaggtcaagcacaagctggttggttgacttctatttggattgtattggccaatcctcaattgcctaagccagtattattgcctttagctattattgcaggcgctatagctggtgctattgtggcaggaattgctggctatttaagagctcaatttggaactaatgaagtaattactactatcatgcttaactatattgtgctctatacttgtcaatatttaatgcaacaagtaatgtcctcaaaattaagaattgataccgatactaccaaaacaattccagccaatggcagcttaaagcttaactggttaactagcatgtttggtgattcgcgaatcaatgctggtattttcttagcaataattggacttattttttattggtatttaatgaaaaaaactaccgttggttttgaaatcaaggcagttggactcaatccttttgctagtcgctatgccgggatgtcttctaaaaagaatattattatttcaatgttactttcaggtgcattttctggcttaggcggtgtagtacaaggacttggtacctaccaaaactacttcactcaaacaactagtttggatattggctgggacgggctttcagttgccttacttggtggtggaactgcaattggtattttattagcttcacttcttttctcaattttaaaaattggtggtttgggcatgcaaactattgccggtattccttatgaaatcgtatctatcgtaattgctgccatcattttcttcatcgctatcaattatgtcattggtttgctttttaaaactaagaagaaccgcagtgattactacattccaaccagaaaagaaaaaggacccaacaatggtgttgatggtccaggtagaaaagtaatcgaaggagaaaaataatgaatttcgttacaatgatggcgttaattgtttcatccactttagtttattctgcgcctctaatcctagcttctcttggtggtgtttacagtgaaaactctgggattgttaatattggcctggagggtatcatgaccatgggagcctttgcggcgattgtcttcaacctaactttcgcttcaacttttggtgcagctgctccttggcttggcactctagtcggcggaattgttggtttgattttttcattgcttcacgctgttgccacaatcaattttcacgctgatcatgtcatttccggaacagtgctgaacatcatggcaccacctttgggtgttttcttgatcaaggcaatttatgataaaggccaaactgaaaatatcaccgctaactttggctacttcagctttcctggtttaagcagcattcccatcgttgggccaatcttcttcaaaaacacctctgcccctgcttggattgccattattcttgctattttgatgtggtggattttatataagactcgctttggcctacgcttacgttcatgtggtgaaaatcctcaagcagctgacacaatgggaatcaatgtctatggcatgcgttatgcaggtgtattaatttccggctttatggcaggtcttggcggtgccgtctttgctcaagcaatatctggtaacttctctgtttctactatcgttggacaaggattcatggctttagctgccgttatatttggtaaatggaatccaatcggtgcaatgctctcatcccttttctttggttttgctcaaagcttaagtattattgggcatcaactgccaggaatcgatcaaattccatccgtttacatgcagattgcaccttacgttattacaatcatcgttttggtcctcttcctcggcaagtcagttgcacctgccgcagatggggttaactacatcaaatcgaaataaggaaaaaaggttgtttcacatgaaacagccttttattttacacatgtccacatagttatccacaagatatagcacttatatgtggtagtcttactatatcttgtactaaataacagctatcggcgttttctcagttggcattggaaaatcactgttaagcaatctaagctcatcatctgtaagtttaatcttttgtgttgcaatattttccttcatgtgttctacactacttgccttaggaatcgttaaaacattgccattgcgcatcgtccaagctagcattatctgatgaggcgtaacgccatgatcacgtgcaacaattttcaaattacgcgtaattcgaattgtgttgcccttgcctgaattaaatggtgaatacccaataaagtttacaccgtgctcttcttgccaagcttgcagatcaaattctgtcccacgttcactgatattgtataagtcttcattagcaaagcattcttctccacctggcactgtaaaaagctcctgcatatcagccgtatcaaagttagatacaccccaataacggatcaagccatctttttgtaatgcttgtaagccgtggatcgtatcagacaagcgatgactgccccgccagtgtaatagataaagatccagatgatctgttccaagacgttttagactggcttctagactctgacgttctagttttggcgttgcatgataggggtagaattttgaaatcaaaaataatttttcgcgatcatatcctttaatcgcttcaccaattagctcttcgctttggccatccccatacatttcggctgtatcaattacactcaggccatgatcaaggccatagcgaatagctgctatttcatcttttttctttttaggatcttcacccaaaccccagctaccaattcctaaacctgttagtttttcaaaattcatcctcgttcacttccttatgttcaaattttaacataattgattcgtaattatttttatcaatcaattgacaaaatggtctattccattttataatggactagaccaacaaatgaggaggacttaattatgaaagttattgttaccgaaaataaaattcaaggtggagcaaaagcatttgaaatttttgaaaaaggaatcaagaacggtgctaaagtcttaggtttggcaaccggctcaacccctgaaacactttaccaaaactgggtaaaaagcgatcttaactgtgaaaatcttaccagcattaacctcgatgaatacgttggtttaaccccagataatcctcaaagctaccactacttcatgcaaaagcatttatttgacaagaagccatttaagaagacttacgttcctgacggtatggcaaaagacgttgatgctttttgtaaagaatatgatcaaattatcaaagacaatcctatcgacattcaactattaggaatcggccgcaatggtcacattgcctttaacgaaccaggcactccattcaacatcggcactcatgaagttaagttaaccgaaaatactatcaaggctaatgctcgcttctttgacagtatcgatgaagtgccaaagagtgctatctgcatgggtactgctaatattatgcaatctaagaagattgttttgatggcttttggtgaaaagaaagctcacgcaatcaagaaaatgattgaaggcaaagtcactgaagaagtacctgcatcaattttgcaaaaacacccagatgtaacggtgatcgtagacgaggctgccgcacaagaattagacgacaaatacaagaactaaaaacaataatttaattatcagcatagaaaaagctaggctttctacaatcgtggaagacctagtttttttatttagcagcctgtatctacaatgaaatatacttcacaaaattgcatttttatataaaaaatgaagcataattcagttttttattgaattatgtttcattcctattcgattttttatttctacccttgacttttagatgtgaaacataatcaaaaaatcacttgtgtgccacaacatatcgtattaaacttaataattgtctacatatggtatttaagaaagaatgtgattcaagttattgttttaagtgggccaattggagccggtaaatccagtttaaccagtattctagctgaacatttagggactcaggcattctatgagggcgttgataacaatcccgtattgcctttatactacaaggacatgaagcgttacacttttttgcttaacacttacctccttaaccaccgtttagcacagatcaatcaagcaattcaagaaaaaaacagtgtctccgatcgttctatctatgaagatgcactgttcttcaagatgaacgccgatagcaaggtcgctgatccaaccgagttcaagatctacgatgacttactcgacaacatgatggaagacactcctggcaatccaagtaagaagcctgacttactgatttacattcatgtctcccttgatactatgcttaaccgaatcaagaagcgcggtcgttcatttgagcaaatcagcactgatccaggtttgaaagattattacgcaagacttttaaagtactacgaaccatggtatgaaaattatcatgcctcaccaaagatagaaatcaatggcgacaaacttgattttgttaccaacatggatgcacaaaaagaagtacttaaagaaattgatgaaaagttgcatgaaatcggcaacttataagaaaaagaaggaacgtgatgacagttattgttttaagcgggccaattggagccggtaaatccagtttaacaggtattttatctaaatatttagggactaagcctttctatgaaagtgttgatgacaatccagttttgccacttttttacgctgaccctaaaaaatatgcattcttattgcaagtatatttcttgaacacacgcttccacagcattaaagacgcgctcactgaagataataacgtcttagatcgttctatctatgaagacgccttattcttccaaatgaacgctgatatcggccgtgctacttctgaagaagtcgatacttactatgagttattgcacaatatgatgggcgagttagaacggatgccaaagaagaatcctgatttgcttgttcatattaatgtttcatatgatacgatgatcaaacgaattcaaaaacgtggtcgtccctatgaacagttaagttatgattcaactttagaggactattacaagcgtctgcttcgttattacaagccttggtatgagaactacgattactcacctaaaatggaaattgacggtgataaattagacttcatggctaatccagatgataaagaaaaagttttggatcaaattacagccaaactaaaagagatgggcaaattacctgaagattgggaaaagcctaccgatattcaaattgaagcataataaaaaccattcatttgcgaaattatcgtatttgaatgattttttgtttacagtgaatttttcgctttattgttgtataatttgaaaaaatgtgtttaaaggaggagtttgaaaatgatgttaaccgtaactggtggacaatggtttttcccacttgtcataatttgtctaattttgggtattgtcgcaaccatcgctcaaaagaaaaagctgactaaactaaaaagaataaccgataactttgcctatgcaatattagttattctcttaatcattgaatggattctatattttcaaaaacaatttaattttattactccagcaatctacacccttgttgtcatctatcttattggacggcaattactaatcagataccgttcttctctattgaaaaaattaggggctaaatataagcaactgacaattggacttgctactatttacattattttagttaccttattgcttttaatcggatctaaattttcaactatgggctggatcattgctggattagttatcgtagcctttggcttcgttagctacatctttgaaaaagacaaacaataatttcccaggaaataataactcgcatagagcttctatgcgatttttatttattcaatttttgctaatgccttcgcaaccccatcatgattgttatcagcagtaatttgttccggagcaaatttttgttttagttctgctggggcattacccattaaaaatggataccccacttcttccaacatatcttcatcgttatagttatcgccaaaagcaatgcaattttgcaagtctacgccatattcttgagcaactattttgactgcactagccttgcttacaccctttaaaacaaattctaataaattctctgctgatctaacaaaagtcaaatcaggatatttagcagttaattcttcttgcatacgatcaagatccgctgaatctcccataattagacctttatgcacgccctgcagtttttcaagttgattaattgtagtcggtgttgcttttacatcgacaattctttcttcatttttaacccgtgggctcttttcttcactacaataccaaacatagccactatagatattccaagctgcatcattatcttgctcatcaacgtagcggcaaatttcagctgcttcttttgcattaaaaaaacggctgattagtactttgcctgtttcatcaagggctaaagcaccgttatacgcgataaacggacaaactttcaaaatttgattaaccactgtcatcatccctttaggaagacgtgctgatgcaggaacgaaaatattaccattaataatttgtctacgaattgcatcccgcgttgcggcggttacctttaaatcatcattaattaatgtgccatcaagatctgaaaaaataagttgtgcggacattctttcacctttatttcttttttaattcttatatcctaggataatgctttatttatgctaatgaaagctgattcaattaaatgcttttcctatcatttaaagataaattgcaataaatgcccaagtaatcattaaaataattcgcgtttacaaatttatttatcaatgctaaagtataagagttgtgttcaataagttaaaacacgaacaatattttggggagataaaatgaattttataaaaagctactttcaattagataagtacaaaaccaacattcgaactgaatttattgctggtttaactacctttatcagcatgtcctatattttgtttgttaaccctagcgtactgggcgccagcggtatgaataccggtgcagtcttcaccgctactgctttagctgccgctcttggtactgcaatcatggggatcgttgccaactacccgatcggtgaggcaccagctttgggaatcaatgccttctttgcttacaccgtatgtattgggatgcatgtttcatgggaaacagccttggcttcagttttcgttgcatcaattattttcatcttaattactttattcaaattaagagaaaagatcattgattcaattccagctgacttgaagttcgctatttcatcaggtatcggtttattcattgccttcttaggtttgcaaaacggcaagttaatcgttgcaaataaatcaactttggttggtttaggttcacttcacgatccacttgtttggattaccatttttggtttgcttgtaactgttatcttgatgatcttaaacgttcctggtgcaatctttatcggtatggttttggcagctatcttcggtatttgtaccggtcaaattgcattgccacacaaggttatctcaactgctccaagtttggctccaacttttggtcaagctatcttccacgttaaagacattaacactgttcaaatgtgggttgttgttttaaccttcctgcttgttactttcttcgatactgcaggtaccttaatcggacttgctcaacaagctggtttcatgaagaacaacaagatgccacgtgtaggtaaggccttagcagctgactcaagtgcgatggctgttggttcaatccttggtacttcacctgttggtgccttcgttgaatcaagtgctggtatcgccgttggtggccgtaccggtttaaccgcagtttttgtagcgatctttttcttaatctcaatgattttcagtccattgcttggtgttttcactagccaagttactgctcctgccttaatcattgttggagtattaatggcacaaaatactgctcatattcattggaacaagttggaaattgcagttcctgcattcttgattattttagggatgcctcttacttactcaatttcagacggtttatcatggggcatgatcacctaccctatctgtatgcttgctgctaagcgtggcaaggaagtcacaccgatgatgtgggtactgtttgtagtattcctgatcttcctgtgggtactgaacttttagatgaaaaagaatagataaagaaaaggactaagttcgaatttgaacttggtcctttttgtgtattcactaacattactttttattcttatcgattataatcgataaaaacgtcaaaatcaccaatcttatcgagtataatcgataagattgcaaaaaaagagtcttttatcgactatactcgataaaggctcttttttatattacccaggaaatattaacgtacagtttctaaacaatatgattttttataataaaatgcgtcataacaggcgaattttaattggctttaaaatttcttttttctaaaaacaagatagcctaaaagggtaaaaagaactatatagcacaatgtaccaattaataattgtggattagagagatgggaggttaagtgataagttgcataattataatactgtgtcgttaaattgagcatattcaaaggattccaacgaataatatcaaccggtccaatattataatttaataaattagatgatagactgcttcccataaagataataattgcatttatcataataactacggtgtttgaattaatcatacaagacattaagcaaataaggctgattattaacgtagaggttataatatcaacgcctgttgttgaaagcatatttataaataatgactgattatacttataagtcgcagtccaaggaactatttttgctataagtggaacagtgttaaagaagatagttacaatcatagctatggcatgtagaaaaagattataaataaaaattgtaatgaactttgcaagatatactgttcctttattttgagcatgatatagtaatgtcaaaatcgttttgttttggaactccattgagaaaatagttgaacctactatgaccaaaatcaacataattatttggctagagttataacaagtcataactaacaaattgccatattgttttcccatggccaatcccataaaaatcataaaaagaatcataaaactgataatccaccaaggcagcttacggtgacctaacttatagaattcttgttttaattccgcacgcataaaagatcacctccgcctaaatagaccgctttttaaacagtaaagcgccaatccaaaagaaaactacagcgtacactaaattagcaataattaattctgaattagtcaaatgtgttacagtaaccatctcattattcgatagttgcgtaatgatattaatcatatttaatggattccaggctaaaattgatttcaaaccaggaaaagccgacattgctaaatttgaaagatctgaaccaagaaatccgattgctagtccgattatgatcactgttgcattattcctaatcaacaaaataagcattaaagagagggcaacgataaatattaaataaatcatcgttcctcccatatttaggaatagcgcattgattaagggatgtccatgataatcatcatgccaagaaaatttcgaaccaaccatcaaggtcttgagaataaacgaaaagattatcccaaataccagtaagatgaaactataaaaaactaaaacaatgaacttagctgtataaagaatggacttatgtgatgttttgtagagtaaggttgccatagtattatttcgccactccattgcgatcatatcagaactaatagcaataatgatgataatagcccattgtcctgcaccgaatccttgagataagagtgagggcgtcattttataacttgtaccaactgtatacaacattagtactaataaaacgagaatcccatacaatggaatcttgcgatgagcaaatttatagaattcgtgtgagagattaattttcattattatctcccccttgttcttgccgtaagatgttgacaatcttctgttctaaagttaagccagttggagccaaatattctatccagatttcattatcaaacagtagcttttgaattttatctatatctttatgatcaactattacagcatcatcttgtctatcaaaaggaattttagcttgttgtagcaaattggtagtttgctttatatcagttgtttttaatttagattttggatttttttcttgagtgaatttgctcataggtgaatttataataattctaccgtgattaataatgattaccgatgtcattactttttgtaattcacttaagacgtgactggaaattaagaaggctgtaccacgtgcagcgtattcatgtatcagttttcgaattaagattgtagcttcaatatccaaaccattcataggttcgtcgagaataaccagttgcggattatttaacaaagccaaagctattcctagtttttgcttcattccaactgagtagtcttttgcctttcgatcaatataatctttcatccctaatcgattaatcagtttatccataccacttaagtctttagcatagagctttaaattatcatatccagacagaaaaggataaataacaggcttttcaattaaagcaccaacagattgtagtgctaaatgatctttaagagtaatttcgtgatcattaaaactaattgaaccagtgaatttagttaatcctagcaaagttttcataatggtggttttgcctgctccgttatgaccaataagtcctacaatttcaccaggtgaaattgtaaaagatgcatctctaataatctctttgtgaccataaaaaatatttatattgttaacttttagcatgctatcctatctccttgaaactgtcaaatcttttgtgtaaatagatctttctcgtaaattgattttttaattatttatttaatcaaagtaggattctaaggtgtcctgaacctgaccaaagcctttatgaattcgattgaaataacggtcattgtagctcattgcctgaatgccaataaaagcatcaagcgactgttcagttggaaactctgccttaggcttagctttgcgcttgatcacattgttaaatgattcaatcatgttagtcgaataaattgaagctctgatctgcttgggatagttataaaagaccagcagatctggttctatgtctttcaagcttctgataacatggctgtaaaccttgccccatttggtatagaagtcatgcaggacagctgtggcttcttctttgtttgtctgttgatgcacctgtttgaattcgttcatgatcttttcacgatcgtcgacgcgtactttagcgcagatattgcgcatgacatgaaccaaacagcgttgaaaatgagctttaggataagtcctggccaaggctgttttcatgccaacaacaccatcagaaagaaaaagctcaacttgctttaagcctcgggatttcatgttttgaagcatatctgtccagacttcaatgttctcgctaggcgcaatgcagtagtcaatgacctccttgtgcccattaggcttgatgccaatggcaatatagactgcttcacgctcaaatgtttctcggcgcaaaggaaggtatgtcgcatccaaatagacgcagaaaaacttgtcgcttagcttgcgtttgtggtaagcctcaacctttggaatcatctgcttggaaatatttgatacctgagctggactgtaatggctgccatacatcttttcaattagatcggctatttccctggtggtcacgcccttggagtaaagcttgataatcatgctttccaagatatccgagtgctgcttgtagtcaggcagcgtgtgctgatgaaattgaccgttgcgatcccgaggcacttgcacttcaattgggccaaattgcgtatcaactttgcggaaataagcaccatttctagagttgccagtattccagccatttctggcatagggatcatagcccagaaaggcagtcaattcagcttctaacaagttattaacagcctgttgtagctctttgcgcaataaatcatttattttgtctggattgaatagagcttgagcaaaatctttggtaaaatcattcatgaaggagttcttctttctgtatgtgtttttttgttcaaaccaatcatacgagaaaggaactcctttttctaatgtttaaagaaataaatttaaggaatcattcatccttacacaaactattttacagtctcaaaatttcatttccaaatcgttattatttttaaaatagaaaactagtgaaaaagataaactataaatagttcttgggctaataagattctgagtattaccaaagaagtacacatcatcgtaataccaaacttcatctccagataaaatttttgaaaagtacatcgataatctctttttatagttatctgtaaaaatatccactcctgtaagatcgtaataagcattacaataaatggctgcttttaaaaaagttcgtttatcgaaactgtcattttcaacttctgataacaattttttagattgcgtttttaagtaattaatatcattactttcatatgcttttgaaacttctaaagttatattttttagataattcgaaatattattattaaagaaatctattttttggacatgaattacttcgagtagtttgaatactttttcaatatctaaacctgcttcgcctctttcccatctttctaattttgaacgagaaatacctactgcttccgcagctttactacttgaaattttggttgcctttcttaattttctaaattttctaccatatgtttctttcataacccactcctagttacgttcacaaataccttcaaaataatgatccagataaaggactagttttacctccttaatgatgccttaatgcaataaaaaatcaaactcataaatattacctaaattttcatttagcgctactaaaaaagcctaataccatcatcaagggtattaggtctttattacctaggaaatactaacgtacagtttccaaacaatatgattttttatgacagtttgggcaacgcaattttctagtatgtggcgtgtgtgccgcaaacataaagcttttaagttctggaacaaatttgtaatcgcaattaggacaaatatatgccactttttgataataatttttaagtaacacgaatgacattgcaatcaagcttactactaaaatagctaccgaaatataggctgcagtgttcatcttattgatgatacagtacgcaataaatgccataccgaccaattcaacagtgatttctactgctgacaatttccacattgaacgtgttacctctttgtatctagtttcattattcatgattttcgtaatgtcagtaacttccgcaatattattgggtttacttagaaccttttgtagttggataattttcttgttttgctcttctaatttttgcgtttctgctttatttctttttagttgatcttcaagcaaaagatcgattaatttatcaccatttttatcttctagtattttttgaatatcctttaacgaaaagccaagctcctttaaaaagatgattaattttaattgttttacctgctcatcagaatataaacgatagccactttcactaactcgactgggtttgaccaaacctttttgatcatagtaacgaatggttctagtggttatgtttaacttctttgctagatctccgattgtgtattctgacattactttctcacctcaaaacttaaatatacgggtttacgctacgtcagagtcaagaataagctaaattttccgtaaaaaacttcaaaaagcaaatattttgctcttttcctattgaaattattaacattaactgtataattttaagtgaatgttcactttatacaaatttcggaggactaaatgaacgcaatcagtaatttctttcatttaaaggagaacaatacctcctttaagaccgagcttttagccggtttgactacttttgtaagtatgtcatacattctgttcgttaacccaaacgtcctaggtgccagcggtatggataaaggtgctctattcaccgttactgcattgtcggctgcctttacctgtatcgtaatggggcttatcgctaactacccaattgcttccgcaccaactttgggcttaaacgccttctttacctatactgtttgtttaggcatgaaggttaagtggcaaactgctttagcagctgttttcgttgcatcaattctgttcattttgttaactgtctttaaggtacgtgaaatgatcattgatgccatccctgccgatattaaatatgctatttccgcaggtatcggcttattcatcgcctttatcggtttgcaaggtggtaagttgattcaaaacagtgattctaccttagttactattggtagtctcaacaaccctactgtttggatcactatctttggtttaatcattactattttcttaatgattgccagagttccaggtgccatcttcatcggaatgatcgccgctgctgtttttggcatagtgactggtcaaattcccatgcctaaaggcgttatctcttcagttccaagcattgctccaacttttggtcaagcagtcttccatattggcgatattaataccgttcaaatgtggatcgttgtctttacattcttacttgttactttctttgataccactggtaccttaattggtttggttcaacaagcaggtctgatgaaggacaacaagatgccacgtgctggtgaagctctagcagctgattccagtggtatgttggtcggttctgttcttggtacctcacctgtcggtgcctttgttgaatcaagtgccgggatcgctgttggtgggcgtaccggtttaactgccgtttgggttggtattttcttccttatttcaactatcttcagtccaattttgagtgttttcactacccaagttacggcaccagctttaattattgttggagtattaatggccgaaaacttggcacacgttcactggactaatcttgaaattgccatcccatgtttcttaatcgcattgggaatgcctcttacatactctatttcagacggacttggctggggtttgattgtctaccctgtatcaatgatcgcagccaagcgtttcaaagaaatcacgccaatgatgtggattttgtttattgttttcgtaatctacttcgttgttttaaatgtaaaataattctatcttataacccccttatcttacttttacattaatatataccctcacgcgtggtgctagttaaatcgttctagacaataagccaaattataagctaaaattgcaatttccaaccggctttgaaagcctatcagactacgtgctcgattgttctcggcattataataggtcagaagcgaaaagtcgctttcaattgttctgcgaatagccatcaattgatgatcattgtgctttttagctcctgtcatatttttacgatatggtgtccaaagttcataacccatttgttttagctgttgatgcagttctttgcctaaatagccttcgtcgccaagaagatagtaattagatggatgggcattttccagcagttcaactgtctccttggcatcatgaactgatgcttttgttacgacataatcaagaatgtaaccgtcatcgctaacaatggcatgaactttgaaaccatagaagtaaattttcttggtggccttataaccaatgttggcataaccgcgaaaaattttagcacgatagtttcgaattggttggcaaacaggtaccggaaagctgtcaatgatcaagaactgtccattcaggtcaacctttttattcatttcttgccgtatctgataaatcaattgcaatagctgacgtgaacgccgattaaaacgtgagtgtgataaacaattgaaacattcacagaatcttctttgtgattcaattcctgtcttagcttgccagataagtaaagccaaaatcagactgtccgtagttttaatttgatcaatatttcgccgatgagtaaactcagccggtgcatacaaacgataccagtgccgacaaattatcactaaatctttaaaactaacttgtaaatggtggctaaaacgcttaagcttaaggcagttcaatcagatcagactcttttctattattactatttacaagtcgagtctaacaagattggacttttttattaactaaaacgatttaactagcaccacgcgtataccctcatctaaccaagtagcatgtctacttggtttttatgctaaaaagatgtctgttaatagtatggatgatgacagcagattctattagatgatataataatcaaagaaaggctgtgactaaaatgaaatcatataaaaaaattcaagctaatgttgactcctcactagcacttcaagcagaaggaatttttcaagatatagggctcaataccactaccgcaataaatgtgttcttaaagaaagttgtggcaactggtggtatcccatttgaattaaaagaaactcctgaacaaaaagcctcaagagaattaattcaaagcatctcaaaaattccccacaaagaagctaaaaccaaaaaggaaattgaggattggctagatgaggactaatgatattgtagatatttatgttgcttacattgataagcctggaggaaaaaataggcctgtattaataattaaattactaaacagtaaagcttggctgctaaaaatcacttcaaaatataaagaaaaaagtgaaaatatccgaaagcattactttcccatttttgactggaaaaaatataatttagataaaccatcatacattgatactaaaaattatttaatagttactattagtgatttaaatatcgaaaaataccgaggccatttctcaatagcagatttacgcaaattaaaagattttattgacgaaaattcaaactaagaattaaactatatgttttagttcctaagtgtctgggaaaaaactaagtctcagatcatgaaaaaagaacgttgaatttttgtttcaacgctctttttgtatacttttagctccagccttgatattattaaatcatcacaaaataaaaaaggtggaaactaacatgtacaagaattatatcacaggtcaaactgctttaacacttaatctagattttgccattccggccaatcatttggctaatgtcatcagctggtttgtagattcaattccagaagatgttttagtaggcaagactgctaaaacgggccgcccagcctatcatccagccatgatgctcaaaatactgctttttgcttactccagaagagttttttctggcagaaagattgagttgatgctggaagaaaatctgccaatgatgatcttggctgaccagcaaaagatttcatatcatactatcaataattttagatcaagcagccatgccaatgaactgattaaaaagagctttatctacttcactaacctgttagaagatgaaggcttaatcaatgaaggtgctgcttttatcgatggtactaagattgaagctgatgctaaccgctatacatttgtctggcgcaaagcggttgaaaagtatcatgaaaagctgaaaggccaggcagttgaactttatgatgaattgattactaaagaagtagtcaaagaaatggaaaaagaaaaagttcaaactagtcaggggctaaaggaattagctcaagaaactgaagcagaaattaacaagctgactaaagagattgagcaggaaaacaaagccattcctggcggttcacctcgaaaagccaagcgacgtggactaaaaaagattctgcaccggctaagaaaagattatgtgccaagaatgcaaaaatatgaagaagccgaagagatctttgccggacgcaacagttattccaaaacagatcatgacgccacctttatgcatatgaaggaagaccacatgaaaaatggtcaattaaagcctggctacaatattcaagcagtcacgaccgatcaatatgtagttgattatgccatctttcctaatccgacagatttcaaaactttggagccggttttggatcaaatgaccgtgttggacaagtttgacaaaatcgtcgccgatgctggctatggcagtgaatacaattattcgatgctggaggaaaaatatccagacaagaagtactttattccctacactatgtatgaaaaagaacagaccaaaaagtataagaatgatccaactaagctaatcaactggtactacaatgaaaaagatgattattacattgatcatcatggcgtcagattcaatttcaaatattacagccagcgcaaggatcgttctactggtcaggtccgtgattttaaggtttatgaggcagacgagttccagctaacgccagaattggaacaattggctaaaacagctagcggccgccagcgccaagttcgctataatcctaactggcaatatttaaaagaaaaagcaaaagaagttctccaaagcgaagaaggcagacacatctatggcatgagaaaatatgatgtagagccagttttcggacatttgaagaacgtatttggcatgcgcagaacgcacctgcgaggtaaagagaaggtcgaaaccgatatcggaattgcctttatgatgatgaatttgaacaaatattgtcaaagaaggtggctgaagggccgatttttattgttaaaaattttaaagagaacaaaaaaacgatcaagattcttaaaaaaggaaatcttgatcgtttttattcatctggaagctagttttttcccagacacttttatttatccaaatggcatcttttgataatcatttgacgccttatgatgttcggattcttctaaattgccgctatactattttcaacaaatcgagttatgaaagatttatttaggaggaattcattatgacaactcaagaaggaaaaactgctttaattactggttcatacggtgggcttggtacccaattcgttaacattcatgcttcacacgggggtgacctaatcctagttggtcgcaatgctaagaaattagccgatcaacaaaaagaagcccgtagaaagtacaacgtaacggcgcatattatcgatgttgatctctcacaaccagatgctgcgcaaaagatctatgatacttgcaaaaagaacggttggactattgactacttaatcaacaatgctggctttggtggtcaaggcgaattcattaaaagaagtatggaacaagacatgtccatgatcgccgttaacattgaaacgcctactcgtttaactaaattatttttacctgacttcgtaaaacgcggccgttatgcctggcccacttcaagccgtttactacgctactaaagcatacgttacaagctggtcaaatgcgttatggcgtgaagtacaaggcacaggcgttacggtaagctgcttaatgcctagcgctatgcaaaccggttttatcagtcgtggtgatttgagttcaactcaattattcgcccatgcggttagtccataaggtgttgcaaaagctgggtatgaagaaatgattgaaggcaagcttaacattaccgctggtttaactgcagcccaaaaaccattcatgaaattggaaccaatgttacctaagaagatgctcatgaacaatgtttataagatgcaagaacaaggtagtagaaagtaatcaacttatcttataatatggatcaaaaggatggtatttgaatgaatcactttattttagatggtcgctatgaagaccaatgtcattaagttaagacattgacaaattatcgacttggacttttaagatcattcatttgcgatttatcgcatttgaatgctcttttttcatgccaaataaacccaaatcttgtttagaaattaggctacacgatataaataatatacagctgatttgggtttgagatttcttttgtcttttcgtcctggtctgatcggaattgtgtaatgactaatttgaataagaatctttttaaagatttcagttgaagaagaaattatatacatagcctggatgacaaaacatgactgtttgaaattgatcgcatattgatacttgcattttttttgtggtacatatgcttgagcatcaatttgactgactgcgttaaacataatcatgtgggcatagatctccatttcaataaatctatcctgcttggaatgaaactgtacgctacctaaagcatatttcaactttttgaatgaagtttcaatgccccagcgcaaatggtagatttctttgatcctttttaagggataatcggctctatttagattagttagaacaacttcccattcttctttgcctgatttaggatcattaattctaaatttacaggcacgaaattttattgtacataactctccaaagtcccagctgccatctttggtatttttagaccgatattttatatattgacggtaatgatggttaaccaaatgaacgttttctgtagccttatgggtttcataataataattagaggtagtcacccagcaagctatatccttatcacactcttgattaggcaactcagctacttccttaaatgcgccatatcccgttttagtacgtatgacataataacagttaggcaggcgattacaattttcaatcatgttaaagccggtataacctcgatccatagtaactatatatggtccgcaatttagctttttaagcatttgaacggcggctttacgttcatccatctttgacttaggctgaaagatgcagtcttgataagtattatttaacaggtcatagagtgcattaacatgaatttggcaatatggctttcctttatgattgagatttccaacgatattctctgatttaggattccagatttgattaaaatcagacccatcaatggcaaatatacgatatttatgatcaaataactggatattaaataaattctgattaaatacagttagaatatgcttaaaacatgcgggtgaaagctgacctttgcgttggacataagcggaagtactgactactttatcgttatttttaatagctttttggccaaaagctctaaacaactcactggtcaaatcttttccttgcatattaatagtagttttaatgactgtagctgcatctaaaaaccgcttcctagtgaaggcatgaggatcatcgataaaatcatgaatatgctttccagtatcattgataatttgatcaagacgatctaaaatatttctgtgaagggctttcataattaacaccagctttctggcaataattttgaaggtttaataatttaatcagagggcgaaaaggtaggttcttttcgcctttattttatgcaaaaaaagaaccaaatcataatgattcggttctacagagattagattcaatttgtcaatgtcttaacttaatgacattgctatgaagacctactctcttttaacgttgaagaagcacttaaaaaagccaatattcctgaagattgtttcaaaaaaccccatccttcaatgagtgaacaacaatactacaattttatggcggctattggtgatcagattagtgatccattcactccaattgaaattgcaactacaaatccaattgaatctttctctccaccaatttttgcggcatatagtagccgtaacggagatatttttatcaagcgtctagccaaatataaaaagctgattggcccattatcttttaaaattgatgaggatagcaagcagctctctattaccctaactccaagtaatcagcaatattccctaccctcttttctagttttatcagaatttgcatttttagtgggacttttgcgcaagacgaccaaagaagctatttccccgctgaagatcacaatgacatcccccgtcaatgatgagcaggtcattaacttctttggctgcaaaatcgaatcgggtaaacgcaacaccatcacttttgccaaaaaagacttgcaggtcaattttattagttataactaagcaatgtgggattatttcaagcctgaattaactaaacgcttatctgaattatccgttgatgattcaactagtgctagagtacgtagcatattgaccgaattacttcctaatggtgaatttacaattgacgatgtagctaaaaagttaggttattctaaacagactttacagagaaagttgagtagcgaaaacactacttttcaaaaacaactgaactccacccgagaagttttagcgctaaattatttacaaaacaccgatatgacaactagcgatattgcttaccttctaggctatcaggaatttaattcgttcttacgtgccttcagcatctggaaaggcataagcattagcgaatatcgtgaaaaaatgaataaataataaaaagcagatatattttctgtttttttactttataaaggaaataatatgagatttttgctataatttactttataaaggaaataatatgaaaattgctaaaaatttactttatgaaggaaataatatgcagttaaatttaattaaccgcccacagtatttaaatcaattacttcaatttcaaaatacagaattcatcaaagtactgacgggagtacgaagatcaggcaaatcttatattttaatgctttatcgtgaatatttactcaaacacaacataaatgaacatcaaatcatttatatttcttttgaagactttgataatatagatctttatgaacctaaaaagctttattcatacttaaaagaacgaattattagtgaccaaagaatgtacattctacttgatgaaatccaatatgtatcagattggcaaaaagtagtaaatagccttcgacttaatcctctacttgatatcacaattactggcagtaattccaatctattaagtggagaattagcaaccttactatcaggaagatatgtagaaatacatgtttatcctctttcttttaaagaaatgctagattttaaacatatttctgaaccatcagagcgtcagattgataacttatatgatgaatacattaaatatggtggtttccccgcggtagtgttagcaaaagaagaattaaaacaaactattctttctggaatttacaataccattattgtcaatgatatcggctacaaaaatggattaagagaaccagaattagttgcattagtagctaaatatctagcagattcgattggtcaattaattaatccgaacaagattgtaaatacactaaaatcagcaaattttgatatctcttataacgctgtgcagcgttaccttaaatattttgaagaagcatatcttttttataaatctagtcgttatgatattagagggagaaagattctttctactcaaggtaagtattacattgtagatactggtttgcgtacccaagctttaggagaaagaaataatgaccgcggtagtgttttagaaaatatagtttatgtcgaattacttcgccggggctacacagttcaaattggtaaattagataataaagaaattgatttcatcgttttcaaggtaaatgataaacaatatattcaagtaacctaccagcttccagaaaattctactagagaaactgataatttacttcaaattccaaataactacaaaaaaatagtcatcactggccgatatgaaaatgaagaaatgatttccggtattccaataatcaatattaaagattggttattaagctctaaaaactgatcaaaataggatcgactaactcatgtcgatcctatttttaaattaaattatgttttttacaataagtaaaaattccgtcatcttgcacgctgccacagatgtcatcagcaatttccttcacatcgtctgttgcgttccccattgcaacgccgtgaccaacagtctttaacatttcaatatcgttgccgccatcaccaaaggctattgcttcgctcacagggatttgataataatctaacactttttcaattgctacacccttactaccagtagctggaataatatctgctgctctatcccaccaagctgttaccttagcattttgcgtattagctacaagtccgtcataatctttttcacgacagcctaccattatttgataaaccgtatcctgatcgacaaccacatcaaaatctggcgccactctcaaatccgttccaccaatagcaaagtattcctttaaatcctcatcaacaccattagctgcaatccgtgttttggtagctacagctaacggccgatttattttctgagcattttgaatcatatgcaagacatctccttgccttaacggattatcaaaaacaatgtcttgatcgttatagcagtaagaaccattaaaagttaaatatgcatcaaaatctacacccaacttaggcagttgcactggtggtctgcctgatgcaatacaaatcataatgccgttgtcttgtaaagcatgcagtgtctctagcattttaggtgtaattgattttttcttttcaattaaagtaccatctatatcaaaaaatattatcttaggtttgctcattatttttaccttctaaagaattttctactaattattatactttaaccgatatttcccaggaaatattaaaattgagctctcttcctcaacatctgtgctaaactagatacaattagtttctttaaaagttaatagttacggaggaatttttaaatgcagacattggaaaaagtctttcatttacaagatgctcataccactgttaaacgtgagttaatcgctgctttaaccacttttgtcagtctctcctacatcttattcgttaacccaaacattttgcacgcagctggtatccctaaaggtgccgcttttactgtaacagctcttgccacagcagttgggtgttttttaatgggttttattgctaattatccgattgccttagctccaaccttaggtagcggtgcctttttcgcttataacgtatgtgttgggatgcatatttcttgggaaacagctttggctgcagtccttgttgcttcagttttattcattttaattactgtctttaaattacgcgaattagtggttaatgccattccacaagatatgaagtatgctatttcagcaggaattgggttattcatcgcttttattggcttaaaaaatggtcaattaattgttaacagcgattcaactttagttactctgggaaaatttagtactccagcagtttggatcacattatttggcttaattttgactgttgtattaatggcattaaacgtgcctggttctatctttattggaatgattgttactgccatcttcggtatgatcattggtcaaattccattaccacataacatcgtttctggtgccccaagtattgcaccaaccttcggccaagcggtttttcacattaaagatattaatacagctcaactttggatggttgtactaactttcttattagttaccttctttgatactgctggtactttaattggaatgactgaacaagccggtatggttgacaaggatggcaagattccacggatcggtcgtgcttttttggctgattcaactgctatggttgaaggtgcagtctttggtactgctccacttggaacttctgttgaatcaagtgccggaattgccatgggtggtcgtactggtttgactgctatctttgttggtattttcttcattatcagtatgattttcagcccattgttacaagtaattccaactactgtaacggctcctgctttaattatcgttggtgtactgatggccagcaacttaaagaaaatcgattgggaaaagttcgaaattgcctttcctgcttttcttaccgttgtagggatgccactgacttactcaatttcagatggtttggcattaggcttgattgcctacccaattaccatgattgcttctaagcgttataaggaagttagtcctatgatgtatatcctgttcgtagtatttatcatctttttcttagttacgaatttataaaaagaatgctaaagataagcagtttgaagctgcttattttttattgacttgatttttattttgtactactgtaataaatatataagacagtttttatgggagaagaaaaatgagactgtaaaatagtttgtgtaaggatgaatgattccttaaatttatttctttaaacattagaaaaaggagtacgcgtggtgctagttaaatcgttctagacaataagccaaattataagctaaaattgcaatttccaaccggctttgaaagcctatcagactacgtgctcgattgttctcggcattgtaataggtcagaagcgaaaagtcgctttcaattgttctgcgaatagccatcaattgatgatcattgtgctttttagctcctgtcatatttttacgatatggtgtccaaagttcgtaacccatttgttttagctgttgatgcagttctttgcctaaatagccttcgtcgccaagaagatagtaattagatggatgggtattttctatcagttcaactgtctccctggcatcatgaactgatgcctttgttacgacataatcaagaatgtaaccgtcatcgctaacaatggcatgaactttgaaaccatagaagtaaattttcttggtggccttataaccaatgttggcataaccgcgaaaaattttagcacgatagtttcgaattggttggcaaacaggtaccggaaagctgtcaatgatcaagaaatgtccattcaggtcaacctttttattcatttcttgccgtatctgataaatcaattgcaatagctgacgtgaacgccgattaaaacgtgagtgtgataaacaattgaaacattcacagaatcttctttgtgattcaattcctgtcttagcttgccagataagtaaagccaaaatcagactgtccgtagttttaatttgatcaatatttcgccgatgagtaaactcagccggtgcatacaaacgataccagtgccgacaaattatcactaaatctttaaaactaacttgtaaatggtggctaaaacgcttaagcttaaggcagttcaatcagatcagactcttttctattattactatttacaagtcgagtctaacaagattggacttttttattaactaaaacgatttaactagcaccacgcgtaaaggagttcctttctcgtatgattggtttgaacaaaaaacacatacagaaagaagaactccttcatgaatgattttaccaaaaatatggctcaagcactattcgatcaagacaaagttaatgattttttgcgcaaggaaattcaaactgcagttaatcaattgcttaaagttgaattgactgcctttctgggctatgatccctatgccagaaatggctggaatactggcaactctagaaatggtgcttatttccgcaaagttgatacgcaatttggcccaattgaagtgcaagtgcctcgggatcgcaacggtcaatttcatcagcacacgctgcctgactacaagcagcactcggatatcttggaaagcatgattatcaagctttactccaagggcgtgaccaccagggaaatagccgatctaattgaaaagatgtatggcagccattacagtccagctcaggtatcaaatatttccaagcagatgattccaaaggttgaggcttaccacaaacgcaagctaagcgacaagtttttctgcgtctatttggatgcgacataccttcctttgcgccgagaaacatttgagcgtgaagcagtctatattgccattggcatcaagcctaatgggcacaaggaggtcattgactactgcattgcgcctagcgagaacattgaagtctggacagatatgcttcaaaacatgaaatcccgaggcttaaagcaagttgagctttttctttctgatggtgttgttggcatgaaaacagccttggccaggacttatcctaaagctcattttcaacgctgtttggttcatgtcatgcgcaatatctgcgctaaagtacgcgtcgacgatcgtgaaaagatcatgaacgaattcaaacaggtgcatcaacagacaaacaaagaagaagccacagctgtcctgcatgacttctataccaaatggggcaaggtttacagccatgttatcagaagcttgaaagacatagaaccagatctgctggtcttttataactatcccaagcagatcagagcttcaatttattcgactaacatgattgaatcatttaacaatgtgatcaagcgcaaagctaagcctaaggcagagtttccaaatgaacagtcgcttgatacttttattggcattcaagcaatgagctacaacgaacgctatttcaatcgaatccacaaaggctttggtcaggttcaggataccttagaatcctactttgattaaataaaagattaaaaaatcaatttacgagaaagaactatttacacaaaagatttgacagtttcagaaaaatgaaaatcaaaaaagtactactgaccacgtctttactcacgattagtttgattactctatcgggatgtagtttccacctgtttaccaacaagaattccggtcctacaatcaaacgaactttgtcctctaagaaattcaattcacttaaggtagccagtgacattactgatgttgaattacatgcaagtaatcaatacaaagttatctatcatgggctcaagcgtttcaaacctagcgttaatgtgaaaaatggtcagttaaagatcactcaaactagtaatggtgtttcttataacatcaaagaaggcaatacagtggcaatctacctacctgccaaagaattacaaaatatcaatattaatctttctgatggcgatatcgatgctgatggcaaggttcaagcaaaaaatgtcaaacttcacagtgacgatggtgatgtcaactttgacgatttaagaattagctctggcaaaattacctcagatgacggcgatatttcagtttctaatctacttactagaaaaggcgccacagttgaatcagatgatggtgacattcgtattagaaagagcaatgccagtggttaccgcctaacttctgacgacggtgacgtcacattcaagggagatacttctgataatgatgacggtggttcttactacaaaaatactaagagttctaacctgctctctgctcacagtgatgacggcgacgtcaacgttaactaaatttcgtcataaggcgataagtttcacatgaaacaaaaaatcaatgcatcattgataatgcattgattttttacttttttcctcattcatagcataaacacgactttacaagattatttaagtttctattgaaatagacataattttaatacgaaaaagataagactaaattctacttttccattaaaaaatatttaccaattttccattttctaagtcaaaatgatgcgtaaatttcttcatcgtcgttggtgaaatatggtggtcaatttcaattactgttaatggcgaattcaaaaagacattatgaatttgctcagcagtttgcggatcaagtgaagcagttccttcatcaactactaaaatttctctttggaatagaaaggcacgcgctaattcaattctttttctttccccacctgaaagattatgcccatttttttcaattacggtatctaagccatgtttttgaacgtaattagttaatcatgcttgttgaaccgcagccatgatttgtttttgatcaaattgtttaccaagagttaaattaaatcgtaaagtctcattgaaaatttgcgaagtttgttgaacttcactaaaaatttgcgtttcaacagactgattattaaccaaaactcttcccttctgcggagataatttacccattaacaccttaagcaaagtagatttaccttcaccggactttccagtcaacagaattttatcccctctattaacgcataaactcacatcattaagcactggactatcagcttgatagccaaaagttacattgtccacatctaattgctcaaatttgattggagcctcatcttgcttagttgttaaaggtttgaaagacaacaacttagcggtcattggtttagtggcggcaatctgattacgaatactattaatactaaagaaactatttacaatccaagcactagagtattgcacggccacaaaagaagccaaagcaacgtgtccttgaattaccataataattccgactccaatcggtaagaagtctagtgagtaagctaataaattaacgtaaaaatcactcttagcaattgtatcgtcacgttcacgtttattctcaacagaatttttgattactttactactcttttttacaaatagagataatacattgtaatttaaaaccgtattgatatttttgagtaaatccgacataaatgttacataactacctgttgatttactccaatcggatgactgcttggctgttttcttgctaaacaaactaggaataaagcttgaaagacttgcaaaagcaacgaagactaatgtcaagactacactatttatcagcgcaatagtaacgatcccaacgattttaaccacagtagatactagtgaaaataactgtctaaagtacttttcttcaatcaagttaagatcattattaatgaaagaaattcgattagaaatttctttttctcctgtttttacaaaatccgtttgcatcaaatgctcacgaaccttttgattaaatagtgctacgttacgattaattactcaattatttaagtattctacaattacaagtaagatttgtaacactgtaattacgataatcattctcaccgtatttggaatacttttccttgtaactaacgcaaagatttcggagtatgaccatgtgctaaaaggcaaagaagtccgcttaaacatgacagaataatactgagcgaaaaccatttgaggtcaataaactttttcataaatgaatctccctttcaattaagttggattcattatctgctttagttcacgataaaaatagctttctgcaaaagtgatcttcaatctgcatatatgcagattattctggaagaatagacagaatattttctaaattacttgccttgatcaatttcttaatagctaatacctgctctgtatctccagcaaaatagcattgataaaaatgaccaatgattttatataagactaaagatggcgtttgacttaattgcccaagtaaataaataggctctttattatcttttacaaatttattttcagcacaagtatataaataattcacacaaatagtggcaattgttgtttgcattttttctgtctgctcagacattttatcattataagtagtgaaaattttttgaaagaaaaaagcaaaatcgtcatgagtaaagatagaggtaccaaaattggctaacaaatctaaactaaatttatcttgaagccaattgtcgcctgcaaacaagcgttgcagtactatatttttatctttgacatcaaatttacgttttctttctagcaaggtaagaatcaacttagctttgattttcagaagatcatgatgcggcagttgttgaatttctgttaccaattttctaacttggttaaagtcttgattataataagcagtctgtaattgatcacctaaattgttttcatcgtcagcttgtgcgactgaattttgcttaaagaattcatcaaatgaaattttatttttctgcaaaattgccattaagtccttagctgatatttcatgcaatccgcgctcaatcttagaataatgggcaggtgataaaattcctgttacaaattgttcttgcgtcagtccccgcgattggcgcgctttttttaatgctgtgttaatttccatagctgtttttatttcaatttacggtcccttttagatacaaaccaaattgtcccatcagaagttgcccagtgtccatcagaagttttatgaaatttcagcgtcagtttcttactgtgtagtgtccagctatttttaccttccattgtgacacggacccggcctaatttttctgaatttattttgttattgtagtctttgggatcatatgaattatgcccatatactttataaattgcttttgctgccgcagtatttggcttaatgtatttataagtaccagatgcatcagtcttaaaaactgggctggatgcatcgatttgaccactatttttccccagagctatgttcaccaacatgccaagatgattttccattacagaatctgtttgatggggatcataggttgtaagatttttattagcaaactgttctggaatagtttgctgattgcgataaaacaaccagccaccgactgccagaactacgactactacaacagttatgattgtagctttctttttcataaaggatcacctgttatctatcagcttttttctgaaaagtaattaatccgtgtgaaactaatctaacagttccgccataataaactacccaacgtactttgccattactgtactcttcatacattctctcccgctgaagatatccattatatgtaccatcattataaggaatttccatcggagtatctacagcaccatcataagcgccataacgcgtcttatgccatgggcctgttctcttaactccatgaacttttttagttaacggtagtttttgaacgttttgaactgaatctgtactagattccgcagcagatacaacagcagtattagtggttgcaaacagagcagttgctgagaataacactaaagttgcttttcttaatttcatatctaacaccttatacctttcttttattgtttattttcattacctagttgttcattatcattgacaacaaaatttgtcatcattttctttttacttgctaatgtaggaattgggtagcttttaagtttagtattatacaaatagccaccgtacataattcctgttggattatgccccattggaacagtgtacatcttttccagatatcctctaaatacctcattgcctcttcttacagtgtaataaacataagtaccctgatcatgatagtattgacgttgataccagatatgttcaacaaatccttttgattcagtgctttgtgttgcagcttgtacatggtttgattgaaccaaagctgaagttgaaactgatactagtgataaagctaatgctgctttagctgttaaagttaaaattttcttatttcttttcataactttaacctactctttttttcttttcttgctttaattactacctaatccagacggaataggaacccatggacccatatttttctctcctttcttatttatttttcattaattttactttcactactaagaactgttcagaaattgtcaaagatgacaattttctacaataaaattcttaatcaaatgagacattccattacttttcataaattcaataatctgatctacttcttcatttttgccatcaaaacaataatggtaataattggcaactattttagcaaaagcattacgtggaatttctggcaatttagaaatgaaatcgtaaattagatttaaatcaattttccttctttgtacgtatacattagccaaataattaatagctattgctgacattatttcttgtagctgaccagacagattagatacattatggcgatacgttctaaatattgaattaatcaaaaagtccatatcttctggggcatatatcatcatacgcgtggtgctagttaaatcgttctagacaatatgccatattataagctaaaatagctatttctagccgctgttgaaagcctactggacttcttgctcgattattctcagcgttgtaataactaagcaaagaaaagtcgctttcaatgctttttctaattgccatcatcgcttactattgcgtggaccttgaagccataataatagactttcttggttgctttataaccaatatcagctacgccccgaaagatcttgacacgataattgcaaacaggctggcaaactggcactgggaaactatcaataatcaaaaattctccagctgtctttacttcttgattccaagcctgacggatacaacgaattagaggcaagagcattcgagctcgacggttaaaacgagaatgagataagccaacgaagaatttacagaatcttcgttgagattcaattccaatttcagtttgccaaatgagcatcgctaagatagaactatcaggaagcttggtctgatcaacatttttacgatgtttaagtccatcaggcgcataaagcttatatagcgagcgacaaatcacatttaaccgattaaaactaacttgtaaatggtgagaaaaacgcttaagcttgagatagttcaattagatcagactcttttctatttaaattacctacaacttttattaactaaaacgatttaactagcaccacgcgtatcatcatagtcattgcaaaaatttgtagagtagattcactccactcatcagaatcaaagacaatttgtctaacttgtcgtttaatattctcagatatttgatcaatttgtttctttaaagatgctattgaaaataccactaaagcataaagattaaatatattctgactttgatttttatattttccaatttcaattttcaaatcttcaagtcgttcgatctgctgatgataatatgcatcttctaattgcttttgccagatcaaatttttgtgagcaagatcattttcactatcttcattttctattcgctctaaaaatatagaagcttgcaatccatgttgctttaacaaatcaattaaatcctgagtctgaatatcatttaatccacgttcaatttttgaatagtaagatgttgataacacatcccccgccatttcagtttgtgataatttcatactttttcttgtttgttttaatgcttcaccaattgtcatatctttccctccctcgtattatcatatttttcattattgtataatgttttgttaattttgcaatagtttgtaaaacaaaagcattatttttatttttcaatcttttatgtttacaaatgtaaacttagcaagtagaataaaaaatgtgaagagatgaaaataaattatttaatttggaggttacggtcatggatgtaactaaaatcattatccttgttgtcgcaatcgccttgatcggctttatcctttggtggttcttcggcaaacatgacgaagctatcggtaaagcaagtgttaatcaaggcacacaagaagctaacatcgtcgttaacggcggttactctccttctaccattgttttaaaacaaggcgtaccagctaaggtgaattttgatatgcaagactctaccgcctgcttatcgcacgttgtttttgaacaacttggcgttaacaaagatttaaccaagcaaaaaatcactacaattaatatcccgactgataaaaaaggcacttataacttcgcctgcggaatggatatgtttcatggaaagattgaggtcaaataatgagtattttttcaaagaatcaaatcaaaaaagttgtcgttaatgcagataatcacggttacaagccagatgtagttaccttcaagcaaggcaagcccgcacaattgaaatttatcccatcagataatatgggctgcatgaatgaaattgtatctaaagacctgggcttcgatcataagctcgatggtcaaaaagaagttgtggtagacatccctaccgaccacgcaggaacttataattacgcatgtggcatggacatgtttcatggaaagatcgtagttaaataatgaaattatctaatattcagcgtttctggatctcctttgtactctccatcccgatgctcattcagatgattgccatgccatttcactggatgatgccaggatacaactggattgcccttattacgacaaccattatcatggcaatctcagctgcaccatattgtaagagtgcttggggcgccttcaaaaagcataacgctaacatgaatacactagtggccgtcggtactgctgtggcttacttttacagcatctacgctatgttcactggccgcgaagtttacttcgaaagtgctgcttatgtaacggtctttgttctacttggggatgccatggaagaaaaaatgcacagcaacgcttccaacgcactagccaagttagtcgacctacaagctaaagacgcagcagttttacgttacggtgaatttgtcaaagttccactcgaacaagttaagccgggtgatacaattcgcgtaaagccgggtgaaaagattccggttgatggtgtcatcactgatggctcaactaccatcgacgaatcaatggtcactggtgaaagtatgccggttactaaaaagaaaggcgacaatgtcgttggctcaacgattaacaccaatggtactttcacttttaaggctaccaaggtcggtagcgatacgatgcttgctcagatcgttgatttagttaaaaaggcccaaaccagtcatgctccaattcagaacttgaccgacaaaatttctaatatctttgtcccagtcgttttaattattgcaattattaccttcgtaatttggtatgttttcttaggcgcaacattggttaatgctatgctcttcgccgtttcagtagtcgtaattgcttgtccatgtgcactaggtttagcgacaccaactgctttaatggttggtactgcccgtagcgctaaaatgggcgttttaatcaagaacggtgaagttcttgaagaagttagcgacattgataccgttgtgtttgataagactggtacaattaccgttggtaagccacaagttactaatgttgtaggtgataaaaacaaggtcttaactattgcagctagtttggaagaaaattctgagcacccactagcaaccgctgtagttaaagctgctaaagaagcaaagactgaaattaagtctatacaaaactttgcagctattgaaggccgcggagttaaggcaaactatggcaatcaagaagcttttgttggtagcgatcgtttattagaagatatttctatttcccaggaaatgaaagatcaggctctccaacttcaaaaagaagcaaaaactgtagtctatgttggcctaggtaatgacatcattggcttaattgccattcaagatgtacctaaagcaagttctaagcaagcaattgcggaacttaaaaagcgtggtttaaagacggtgatgcttaccggtgacaatcaaaatgttgctgaagctattggccgtgaagtcggaatcgaccaagtaatcgccggtgttttaccaactgaaaaagccgctgagattaagaaattgcaggatgaaggcaataaagtagcctttgttggtgacgggattaacgacgcacctgcattgtctacagctgatgtcggaattgctatgggatcaggtaccgatattgctattgaatctggcggtatcgtccttgtacagaatgacttaatgggcgtagttagagcgcttgagatttctaagaagacctttaacagaattaaattaaacctcttctgggctctgatttacaacacgatcggcattcccattgctgcaggtttattcatggcctttggcgtgcagcttagtcctgaacttgcaggcttagctatggccttctcttctgtttctgttgtaactagttcacttttattgaataaaacaaaaattgctggtgaaacagctcaagtttcaaagtaaaataattctccgaccggatattttaatccggttttctttttgtaaatttttcaatttgcgacttaaagtttcagcagtaatacccaaatatgatgctaagtctttcttttttaactttaattccacatttttactcccctgtttttgagctaagtcttgcaaataggccattaagcgttcctgagcatccattgaattgcgccgaatagagttagtttcgattgtaaccagctgctcgccaaaattattaagcaaattcaatgctaaatctggcgtctttttcaataacttttgaaaatcacgacgctcaatagaacaaacataagtatcttgtaaagcctgcacaaagttttcctgggcatgttcttgaaaaagattctgctgtccattagcatcgccttgattcagcacacctaatacggtctctttaccgtcttcgttgagattgtaaatcttggcactgccttgatccataaaaagcattccgttcttaccatcacctggttgtcgaataatactgccttttggaaaatattcttggtgcgttgaaattggtactagtttttctaacatttcatttggcaaatttttaaatatggctgctttgcgaatacaagccatgggtgaatgttgcataaaagcctcatttcttgatctaagtcaatttatttttatctgcatcttaatacaatgtatttaacaactcaagcagaaaggaaatattaatcatgactaaatacatcgcacatattgagcctttaaacgctgaaaaaattggtactaaggcacacggtactgccacttttgaagaaaaaggtgatcaactacatattcacgttgagatgtttgatactccagcaaatattgaacactgggaacatttccatggcttcccgaatggtcaaaaagctcatgtaccaactgcagctcaagacgttaaccatgatggctttattgatttaccagaaactgagccggtctcaggaactacaatggtgccacttgatgatgccccagaaaacatgaatattcctcatgatggttatcctgttgccgacagtaatggacattatgaatatgagattgatgtctcattaacaaagctacaaaagaaattcaaagctgcctttggtagcgataaactacaactagacaagcgtgtagtttacgttcatggtgtacctgcagatctggaattacctgatactgtaggtggttgcgtaatgagttatgatgcccatactaccttgccaatcgcagctggtgaaattgaaaaagcttaagttaaaagccattccttgtgaatggctttttgcatcctttcttattttttgatagcatagatatagattatgtaaagtatctaagaaaaggagatgttttataagtaggcttagatcctactcttatggagaataacgaaaaaattatccaagaaaagaaacgcgaaaaatttattaaaactaaaaagaattacaagcgtgcaccactaatgtcagttcacttaagagtgatgatggccgttatcttaggtcaaatcgcctgtggctattccctgggaattagtggtaccgctctttctaatgcagctaaatatatcaacattagtgacttctggactggattaattggggctggtgctttaattggccttgctggtagtcttttggtcggtcgactttctgataaaatcggtcgccgtaaactcttaatgtggaatatgtatatattagctgctttttctttattacatctaataaccgctaattttagcttaacctttatcctccgtattggaattggtttaatgattgctgttgactatactgtagggaatgccttgttaaccgaatggctacctaagggtgaagacagcaagcgccagagtcatttattaatctactggactattggttttattttgtcttacctagctggtagttttatcactggatttgatagttatacttggcaaataatcttagcaacaagtgcagtacctgcactagtaactgctatcttcagaagtcttttcccactccctgcttcaccaggctggctagcaagtaagggtaagattaagacggccaacaaggtcattcgtaagcacatgggacgcaaatggagattacctgcccgctttatgaagcggaataaaaagaaaactcctagaaatatttcctgggcaattttattttccaagcaatatctgcgacgtactctagtaggtgggattttctatgcctgccaagccttctcatttttcggtattagtatcttcttgccaattttattacaaagcatgaatatcactagtggaaatatctcaggaattatctacaatggtgggatgttcattggtgtgctaatcggtacctggatctttaacaaggttagccgccgcttctatcttatcagtaattttctaatctcaggtctgctaatcggcattttagcaatagtacctaacttaaattcaatacttaaattaggtatttttacgttatttgcgattattttatcagctggtttgatcctagattatccttatccgactgaattatttgatctgaaggtacgagcaactggtgtaggtacttgtattacaatcagccgaatcggggctgccgcagggactttcttattgcccgtcttaactaatgtgggtggtgctagcctggcaatgctagtttgtgcgattgttttactctttgcctttatcgtttgcctcatctgggcaccggagacctcaccccaatttatgaaaaaataaaataattaatatgctacacaaaaagacagattacatatgatgcaatctgtcttttcttatttcttatcttttttcttcttgtccttagaatccttatttaataattcttctggatccttatgcttaggcgtcttctttggatctggtacagttgcaaagcgatcaagcatcttctgtaagttattagggttgtcaaaagttaatcccataaaacatcttcctttcgttttctcaattatattaaaatttcaattcaaatgacaataattttaaccctcattatcaataaattgttgcatcttaatcatttctgaaccagccagatcaacactaattaaatcactataatcatgaacactagtatctcctaaaccatattcagttacaatttttaggtcgaagccactatcagagcgatcttcaattaagcctaaacgatcaggataatgataaattgaatcactaattttcactatttgatcttcgggccaattatcaataatttctgctggtgactgaatttcatcccgtaatttaactgaacgctccagcctgtccggatcaaaactgccattatttttttgccattgaactaaaaaattaaagaagagcaagcgctcggaatcttcagtaatatgcgttatatggctcctagcaatcactgcaattgattcaacctgccctaactcattgatgctctcgaataccagattatcatcgtcatacttgagtactttaccaatagcaaaactaccatattgatcatcaaaggtataatcaaaataaatttcaaccagatccaagtcgttagtgaattcttgcttctgtgattgccgcaaatattgggtaaataagcgattatcaatggcattagtatcgacacaaacaatatcgtcaagtggtataacggtggcataatgctctaaagttaattcattgcgttctaaaatacgcacctcttgctgatcaagttgagtaattaagccagtgtaagtagcacctgtattcacctcaaaagttgtaaagggttgcgcgtcagctacgttaatcagtaaatcatgcagattagtaaaatcccaggctaacactgtcttatttaattgctctaagttaaatgaatccttaacttgggtaatcatataatagcgtagattaggcgtatcgtcttcaatcttagctacttgatcttctttaataaagactattccacctaaattaccgccttgatcgactgattcaaaggtaatccagccatgatgttgcgtgataatgcggccaatatagtaagaatttgcatcaactaccgtaatacttgcatccccacctaagttatatttttcttgatcagccttaagcgtgatttgtacaagtttattcaatttttcgccccctcttttttcttccgtgaatttaattgtcgcctaatcattatttttctgcaagaaaaaagaagatgttttagccatcttctaatattgagttaattctgtagaattttggggctaacgaatattacttcttttgtgcagctgcctcagcttctgctgctgtgtttgaaggggttaacgaagtactgtttggatcaaaacgcacatcgcttgcttttacataaccatcagcaaattggacttcaccttgattactatagacagatttaccaactaagtgataaaacagttctgccttattttcacttggtacccagatgtaaagcaacttatttaccttgtatcttccaccttgttttctaacttgatcgcccttgaagtcaatcttgtttccgttagcatcatagatatcagttggcttaataaattgaattagtgattttttagtatgataataattttgaactggaatatctttagcagctttaacattgaaattataaatccaataatcagttcccttaatatgatagattgctaattcgttgtcatcgtcaccatctctaccagtatcagcacgtgtcccttgctctaaacgatccactgtaaacttatcaccttgttttgcgtattttcctgaaggctgaactgcatctttatcaggtacttcaacaaaaagagcagcacgtttatcagttacagtaacagtcgtttcttctgatttagttgtttgagacgaagaagaactagtgttgttatttgtattaacactaattacaggacctaaattataagacttaatgtactgtttattaggtccacctattctaaagtaatgctttccgttcttaaatttgtatgaaccgccataagtcgtgatagtttcacccttatacaatttccaacggttattgtaagaggttctgccagttgaggtacgataaatgtaagtattatgagtaatcttacgtgttacaccatcaatgttggtagcctttatgtattgatccttgccgcttactttatagtaaagcgagccgtcaattttcacagggttgctttcaacagtgacatattgataggcattgtattttacacctgtgctgttaccatccttgtcgtaagctaaagcagtatgcataactgctttagtcgtagcagcttgtacttcattagttgtattagtcaaaacagccaagggtgcaactgtcattaatgtagctgcagaaattaatgcaatcttatttttcttcatcataatcatccttttcaaatctctacactgctattatattctctaaagctaattaaagcattaaaaagaagccaattaagtgaagtggacttctacttttgatattttcttttaatttattttttcaatgccgttgcctcagcttctgctgctgtgtttgaaggggttaatgtcaaacctatattaacaaatttaacatcactagctttaacataggcatcattaccaacttcaatttgatcaacgttacctgtagcatagaacttagtaccaactaaatggtagaataattctgccttgttttcacttggtacccaaatgtatatgagtttatctactttcagatttccaccttgttttacaatttttgcgccattgtggttttgcatagtaccgtcagcattatacacatcagtatccttgacaaatttgatatagccataatgttcgtgatcataatcatgctttactaattttttatcggcagttacatcaatagctaaaagccaattgtctgtaccttttattctatacattccagcttgtgctgcagttgatggaaaatgatcagcaaacggagtaacttctagtttatctacaataaacttcgtaccagctttgagattctttttgattgctttaccttgattatcataaatatttacaccgtaagcattttttacggtaacagttgcttcctcggcattagtattagtagcgttgtttgattcattgctggttaaatttgatgcagtattagtactaataactgggcctaaattatatgatctaatatattgcttacgtggcccacctactctaaagtaacgtttaccgtttttaaatttatatgatccaccatatgtagttacggtttcacctttataaaatttccatttcttactgttggcagtcataccataaggtgtcctttgagtagaagtccggtatatataagcattatgagtaatctttcgggttacaccatcaatattagttactttgatatattcatctttatctgtaactttgtaatattgacttccattgatagttactagttttggatctacatgaacactaccataaacgtaatatttatgaccggtactatttccatctttatcataagctaatgcgttgtgcataatagtcttggttattgaagaatctgcttgtactgtatgagcgctagttgtagtactcaggataggtgccgttcccattaaagctactacagaaattaacatgattttattttttttcattattaaccaccctttgaaaatctctatacttcaattatcttactttgtataaacttagacaacaaaaatagcatcaaatcatattgatttgatgctattaaggctaaaatttacaaatttagtcccaagctaattcataaaccttatttgaaacagttttatttttaccgttaacattagcatggtatgcaacagttaagtaaccgtgattttcatcaataatttggatactttcaacttcactatgttcacctgaaatatctaatccaccaaatgcacttaagtttacattttcccattgagattgatcattacgtgcataaaacggaatttttacaatttccttgtgatagtatgaccatgaaccattacttaaacttggtgatttttgactagtaatataaatattaccagaattatcaagatcataaccttgtacagagtttaaaacagatccatacaaaccatatactgtaaaactagtttcacattgataatttcccatatttacgaaaccattatttccagcctcatctaatgcattattaatgacatttaggtcataaattgaaaagtggcctgttccattattctcaatagtagcaattaaaagcatactataatctggtgaaactgctacttcagcgcgttccatttcatcaccagagcattgatcttcaggattacctgcgcggttcaagtatgctaaacgtgggaattcagtatttgatgaagcatatgatttgtatctaatatctgctcgagcaatttgagaagcccatttattcttgtttttagtaccaacgaaccatttaccagatctacctgaatattcccaagtttgggtgtgtccagctgctgcacctactaaagtaagcacaggggttgtcacgttgccacggaagccacgcaatacatgtgtttctgtctggttatttcttaactgtaaaccataaacatactttgatcctacattacctttttgaactacagctctgtaacctgtattcatatcgaatctatctaaaattctaatatttgttgcatctaacataataaaacctccgaaaaatttaaaaactactacttatcctgagtttgctcattcatctgtttagccacttccgcaaagatgtcctgcacttcttgcctgttcagcttgaagccttttgcttcaaggctgttcactactgcgttgccaacacggttaatcttctgttcgtcagaaagattttctttgtcgtataagcgtacatagcttttcattaagctatctgcagtattgcggaattgctctaagcgtttattcttgaaatgaactctgctcaagatgccaatacctactacgctaattacccataacgccagagtaatcagctcaacgtaatcatgaatatccataattgaatgaatcacctctcttttgatcaaacgatccaagggggctaacgaatgtccattggacttcacctctgtttgataatgttcaacaagacactaatacacttgatttatattagtttttagactaatataaatgtataagaaataaccgaaagctggtaaatgttccgccaagaattttattaacttaggttgttttctttttcatatctcgttgacaatatttactataagttaattaactaattatgtcaataaaaaaagctaaaaaactattattttttcgaacaagtattcttgaaaggcttggtatgattgagttagagcgcacaaaagaattagcaaaaaaatacaaaatgaatctccgtgaagtaaatgacaaggcaggtttaggtagaaattccatctataattggaagaatcaaagaccaggaattgatgcacttaatgcagtcgcagatgtactacatacgtcagccgattatttaagtggtaagacaaacaatcctagcccgtcacctaaaggtgatgaaactggtggtatttctattgatggtgaagtaccatatttctatcatggctacactattccagaagactacctgaacatagttcgtcaacttatggaacgtgatatcaaaaaaggacttattaaacgacatgacaacagcagatcagaataaacaagaactcatagactggttattagcctatgctaaaaaacgtgatattatggttgaattagttgaagtaaatccaacttacccatccatttctttaaagaactatagattcgctgtcattaatactaattggcatcatcaagaagaagtaccattttcaataggtcatgagattggtcacattatgctgactaatggtgaagtagattctcgtcaatatatcacttttacagaacagaattccgaagaaagtccagcagacatcttttcaataaagctaatctataattactcctgcaaaatgggtgattgcttcgaagatacaggtttatttatgcaagcatacgggataccaaatcgagtagctgatgcaactaaagagatatttaagcgagcagcttaaccatcaacttctatattgatttgattactaaaagttttagcattagtttttacactacttaaaatccaattaaacaaaaaatcgctactcaattgagtaacgattttttctatccatccagttcaacgccttgcaagtccttcatcttgctataaaccgcgccacgttgacttgaatcaaactccagaataagcatatctccgccgcgaattacggtttgaccatttggtatgatctcatctccatcgcggtgaattgttcttaccctagtatcaaccggccattgaacctcagaaatggttttatcaaccagtctactgctctcatagaccggcagagccattgtatcagcctgaccagtatagttagccttatggtcactactcttgtccatagcggctgctagaagcccgtagataggcttaccgccaagaagttcatcaactaataacgcaatgaaggccaccacagctaatggcatcaagtgaagtaaggaccctaccatctcagtaattaagataatcgccgtaaatggtgcacgaatgattgctgcaaaatatcctgccattgaaaaaatcactaggttaactactaaacgctgcggtaacaagcctaactgtaccatcatcagtccataagttgcaccaatcaaagcgcccattgtcaaaattggcaggaagataccactaggaagacctgaatcataagcaacaatggagaaaacaattctcatgacataatagaaggctagcatccctacaatgccccaacctgttttagtgattatattcggcaatgccagaattaaccgattacctggaccggtgattaatggccaaaagtaagcaatcgggattaatattgccaaaggaataagtccatgcagccaacgaggtaaaatggtgattttagcatagaccttctttaaactaaataaaccaactttatataaatgacccaataagcctaataaaatccctaagataagcaagtgccagtacaacgaaatcggaaatgaatagttatattgaattgctagggcgtgacgaatgccaaacaagtttgaaacgacaaagtttgaagcaattgcgccagctaaagcattcatccaaactaatggtgaaaagttatggaatacttcttctaagacaaacaaggcaccactcaaaggagcgccaaaagcggcagacaaaccacttgaagcccctgttgcaagcagaattctagtttttaatttgttctgcttgcatccctgagcaacaccttgaccaattgtcgagcccagctgcaatgatggtccttctggtcctaggaatagccctgtgccgataaccaagataccaccgattaatttccgccataaaattggaaaccattgtagtgatagcttcccttgcagttgcaattttacttctggaataccagaaccaccaacatggggatattgtttaacaaaataaccagcaattaccgctaccgcaataaagccaatgataatcgcaataaaccacaacggattctggtgcgctaattgaaacaagtataaccaaaaaccagatgtcttttcgattccaaatctaaataaaccaactactacgccggtacatattccgacaagtagtgcttggagcaacagtttaatattagttctgtttgcctcgtctttcattactttctccctcacaataaaaaaaacgtgtcacaaactattgtacaacaaaaagccagctagaaatgttccaatgtcattaagttaagacattgacaattaagggtgcttttttagagatcgaatcatttggattcgatctctttttttgtataaaataaaggcgaaaagaccagccttttcgcctatcttatatattatatattttaaaccttcaaaattattgccagaaagatggtgttaattatgaaagcccttcataagaatattctagaacgtcttgatcaaattatcaataatactggggatcatattcacgattttattaataatcctcatgcttttaccaggaaacgcactttagatgcagcgacagtccttaaaactacaattaacatgcaaggtcagaatttaaacagtgaactctttagagcttttggcgaagatgcaactaaaaagaacgataaagtagttagtacttctgactatgttcaacgcaaaagccagctttctcctgcttgttttaaacatattctgactgtttttaatcaaaatctatttaatattcaactttttgatcatcactaccgtttgtttgccattgatggctctgactttaatcaaatctggaatccgaaatcgaataacattgtacaagcttcttctcataaaaagaaaccctattgtcaaattcacgttaatgccttatatgatctattgaataatacctaccaggattgtatttttcagcctaaatcagaaatggatgaacgcaaagcggctgttcaaatgcttaaagctttgaattgtggtccatatattgtaacaatggatcgtggctacactagtttcaatatgattgaaaactgcaatcgcctgcctaactgtcattacataatacgaactaaggctggacaaggcggagttaaagaaataacgacattgcctgatcaagaatgtgatcgtgagatttcctgcctggtaactacttctaactattactacatcacgcataaagccagtgagaatattcaccatgtccagcatcattatcgccaatatattaagtatcgctctaaaaatacccaggatctaagctgggattttggcgagttatgcacaataaaatttcgagcctgcaaatttagaattaatgatgccaaatcaggcaaagaagaatgggaagttgtgctaaccaatcttgatcgaaaaaattatccgctaaaaagaattaaagagctttatcatctgcgttggggtattgagacctccttcaagaaattgaagtattctttaggcagtgtacagttccattccaaacaagataaatttattgaaatggaaatttatgcccatatgattatgtttaatgcaatcagtcaaattgatgcacaggcctatattccgcaaaagcattgcaagtatcaatatgccatcaatttcaagcaatcatgcttgattattcagagcatgtatttggcttcttctttaacgcaagattttgaacggatccttattcagatcagctattataccattccaattagaccaggccgcaaggacaagagaaatattaagcccaaatcagctgtatattatttatatcgcgtagcttaaaaaagcagaatctgtgctatgccttatttgttgtacgaaaaaagcaccaatttaaccaattaaatgttaaatcagtgctttaaaagtctaatattaattgtcaatgtcttaacttaatgacattggaaatgttctaactgacttttttgtttcatgtgaaactaattatttttcttcataccattcggtgtggaagacgccttcacgatcatttctaaggtaagtgtgcgcaccgaagtagtcacgttggccttggatcatattagctggcaagtttggattaaagattgattccaaccagttaagagctgcgctcaaagttggagttggcacaccacacttagtagcaaattcaactgacttacgcaaagctggcaagttttccttcatcaaaccgcggaaataatcgtcttggaataggttcattagcttgccgttcttgtcataggctttttcaatatccttaagcattgcggaacgaatgatacaacctgcttcccaatcttgagcaattgacttgtatcttaagtcccaatcataagcttcagcagccattgtcaattgttggaaaccttgagcataggcaacagcttgggctaattgcaatgatttttcgaatacgtcaaccatatcatcaggaatttcaccattgtattcaaacttagttggtttaacgcccttttcaattgtcaagtgtgcttgcttactcatgaaacgtgccattacagcctcggctaccaccgttacaggagcgccaagtgcaacaccatcttcgagcatccagttaccagtacctttgtatgaagcaacgttcaaaatgtgatcgattacgtgatctggcgttaaatcatctttttgtgccaaaacctttgaagtgatttcgctaagatatgcttctaccttaccatgattccatttatcaaaaatttctgacatttcatcatcgctcttgtgagcaacgtcacggagtaagttgtaaacttctgaaaattcctgcataataccgtattcgataccattgtgcaccattttgacatagtgaccagcaccttcaggtcccatgtagtagacacatggcttgccttcagtattcttagcggcaatagcttcaagaattggagcaacttccttataggctggttcatcaccacctggcatcaaagctggaccattcaaggcaccctcttcaccaccggaaacacccataccaataaaatgaatgccgtgcttttccatttcgtggaaacgacggttagtatcgtgataatttgagttaccaccatcgattaaaatatcgcctttatccaaaagcggcagcaatttttgcaaagtttggtccactggatcgcctgccataatttgaatcaaaatcttgcgtggcttttcaagtgagtttacgaactcttcccaggtgtagcaaggctttaatttatcatcttcatattttgcgaaagcatcaacttctggtttgtcgattgagaaaccggaaacggagaagccgtggtttctaacattcaaagcaaggttcttgcccataacagacaaaccgataacgccgaattgttgcatgtttattaattcctccattaatcaaagttcatcaagtattattatacgttctagcacgcaaaaaagcgaaaccaaaaggttccgctttttaaaatctagttaataatttttttgttattgggtaaaggtgtttcacacactgctcggtaatatttcctaggaaatattacttttattgatcaataccccaaagtaaaatgttaaatgctaatggtaatgttagcttggtaatgtatccatcctttttagcctgttttaaagatgctagaacaaatttacgttgttgacccgttagctttttggctactttaacagctaaattaaagtcatactcgttttttctaatagcatttttgataactatctttgcccacagaaataggttgagaatcggagtttacagttacaatgtagctccacttgctaagtcgaggaatatttttaattgttatagctttatcaaacttagctactgcagttgaattgctgttgtctgcagcgttggcagtgacagacgatgctgaaaataatgctgcaagtaaagcagtagcaagtaaactaattagagcttttttagatttcataatttagcatctttttacacatagtgcttattggctaataagcattaattcatatccaacactgtctattataagcatctgtattctatttactagccaacaaactattttatatttaaaatcgtatataaaatgaggctatttcccaggaaatattttcccatacaaaaaaagcgggacaaacgtctcgcttctttataattactcaaccaaattagtgttgtgaagcacctgaaaccgtatcaggagcaggatcctcttctggttctgattcttcatgttgagatgcacctgttgcagcgtcagcttctaagccgtacttttctgcaaagtaactgaatggcttcaagtcttcagcttgatacttcttgacaaaggctgggtcgtcaagtgagttcaactcagttgagtaaggcatttcgtgagtgtacttgacgtcgatcaacattggaccgtccatcttcttgaattcgtcgacagcatcttcgaattccttcttggtgcgaaccgttacacccttaacattcataccttcagcaacctttgcccagtcgttatcagggataataacaccagataatggttggtgagattcatcttcttgttctgcttgaatgtaacctagtgtttcgttagtaaatacaatattcaaaacatgcatgttgtaacgagccatagtaagaagttcttggttcatcatagcaaaaccaccgtcaccagctaattgccatacttcacggtctgggtaaacagttgctgcagtaagagcagctggagcaccataacccatagttgcgtgcaagcctgaagtagtccacttttgatcatcatgcaagttcaaaagacggcatgagtcaacgttaacgttaccaacatcaatagcaaagatggcgttgtcatcagccttcttgttgataacatcccagattggttcaggacgtacaggcatttcatctgagttcttaaagcttgcttgccatgcatcccagttctcacggtctgcaatagcagccttgtaaagtggtgattcgctacgttcttcaccagcgtcaataattgctctcaaagccttcttagcatctgcaagcattgaaacatcagttgagtgacgcttaccaaacttagctgaatcaacatcaatttggataaccttagcgttcttagggaaccataaaactgagaatggtgagttgttacctacccaaacaactaagtcagttgcgctttggacttcttgagcagccttaggtccgatacggccgatagtacccatgtatgctgggaatttgtcttctactacacccttgcctaagtatgatgacataataggggtcttgaacttttcagcaaattccttaacttcttcaccagcatcctttgcacctaaaccaatgtacatggttgggttcttagcttctttcaaaagcttaacagcttcttcaactgaagccttagttggtgctggataattgtctgctggatgagcatccttgtttacacggaaggtgtcatcaatcttttgccaaccgtagtccttaggaataatgataactgcaggaccctttcttgcgtaggcttgacggatagcttcatcagttaaaattggaatttgttcagcggtcttagcttggcggcaccaaacactagcgttcaagaaccacttgtcttcatcaaaagcttggaagaagtcaatatcttgacggctagttggaacgttagcaacaattgctaccattggagtcttgtcaaacttagcatcatacaaaccattgaataagtgggcagcaccaggaccagctgaaccgaaacatacacccaacttaccagttaacttatattctgcagaagcagctaaagcaccagcttcttcgtgacgtacttcaataaatttcatcttatctctaaagtcatagatagcgttcatacttgagtcgaatgaaccacctgggaaaccgtagatatgatcaattccccaatcgtaaataactttaagcattgcatcagaaccattaatttttgtcatataagtgcatctccttaacttttgttctttcataatgtattaaaacactttttttcacatttgcaaaccgataaaatcaccgttattacgcaaatgaaaacgcttttgtaataataatcacttcacaagctttaccaaattcaatatctcaaaaagctgaatggtagcgttttatattgtgatttgatgaacattattatactaaatttcacttattttatgtatattcattgttacttatagtaaaaatttaagaaaaaattttttacaatttatttcatagctatccaatttagaaaaacgttattttataattttgcgcataaaaataacgtagaatactattcctacgctatttttgtgctattctactttttcactctagagtaacgcccattttgaatgtaaacactcaagattgccaagtcagctgggttaactcctgaaattcgttctgcttgagctaaagtttcaggacgaattttttcaaatttttgccgtgcctcagtagctaaaccttcgatttggtcataatcaatatctgctgggatttttttggcttcttgtctctttaagcgagcaattctggtttcttctttcttgatatagccagcatacttgataccaatctcaacttgttctttaacgtaacgatcgcctggaactttttcaccagttaaccgttcaatatcagcaatagtaacattagggcgacgcaagaaaacatcggccttaacaccggccttcattggttcctgaccaatactttgcaaaaattcctgcacctcatcagttaaatgaaccgtaatttcatgcagtctcgtctttgcatcttcaatcgcatgcttcttttcttcaaatcgtgcgaagcgttcgtcagaaattaagcccagatcatgaccatattcagtcaaacgcaagtctgcgttatcattgcgtaaaatcaaacgatattctgctctactagtaagtagacgatatggttcattcgtccctttggttaccaagtcatcgattaacacgccaatgtaagcatcgttacggcctaaggtaaatcctggcttatcttgagcagataatgccgcattaattcctgcaattaaaccttgaccagctgcttcttcataacctgatgttccattcatctggcctgcagtaaataaatgctttacgtttttggtttccaaagtatgcttcaattgccatggttcaaccacatcgtattcaattgcatatcctggtcgcatcatttccgcatgttctaatcccgcaacagaatgaatcatctttaattgaatttcttctggcattgaagttgaaaagtcgcctacataaacttccttggtagtctttccttctggttcaaggaaaatttggtggcgatccttatctgcaaagcggacaactttgtcttcaattgaaggacaataacgtgggcctacacccttgataattccagagaacatcggtgcacggtcaagattgtttctaataatcgtgtgtgtggttggattagtataagtcatccaacaagaaatttgtttttgtaaataatcttcatcacgactttcatatgaaaagtgccgtgggattttatcaccaggttcttcctcagttttagaatagtcaattgtattgccgttaacacgtggaggagtaccggttttaaaacgacgcagcttaaaacctaacttttctagattttccgacagcttaattgaaggagtagtgttatttggacctgaagaataagtcaattccccaataataattttaccgcgagccgctgtacctgtagtcaaaacaacgcttttagcatgatacttcgcaccagtattggtaatcacacctttgcagacgccatcttcaactaccaattcatccacgatagcctgacgcaaggtcaagttgggcgtattttcgatcgtatccttcatgtgttcatgatattgccacttatcagcttgagcacgtagcgcacgcacagctggccccttacccgtatttaacatccgcatttggatataggtagcatcaatgttctttcccatttgaccacctaaagcatcaatctcacggacaactgtccctttagctggtccaccaacagatggattacatggcataaaggccaccatatccaaaccaatcgtaaccagcaaagttttttgtcccatgtgggcacttgccaacgcagcttcacatccagcatgcccagcaccgacaacgattacatcatattcatttgaatcatatgttttaaccattttcatcctactttcctaaacagaattgactaaataattgcgtgattaattcatctggggcactttcaccagtgatttcacctaaagtatcccaagcaccagtaaaatcaatttgtgcaatatcaacagggacgccatcttcaactgcttgaattacatcttccaattctttcttagccttatgcaataaggaagcttggcgttgattggttaccataatttgatcattagaattttcaatcccagcaaaaaatagcttattaatcaattcttcaagcgcatctaagttttgttctttcaaaatcgaagttgaaataacatcactacccgttagtttctccatctcagtagttgttattttttgacctaaatccgacttatttaagatcacgattcgcttcttgtcctttgttgcttcaattaaggcttgatcttcagctgttaatgcttgactagcatcgattaacaacaagaccagatctgctcgctccaaggccttttttgatctttctacaccaattttttccaccttatcttcagtgtggtggattccagcagtatcaattagctctagcggtactccttttacagacacatattcttctaacgtatcacgcgttgttccagccacatcggtcacaatcgctttgtcgctttgagtcagataattcaataaagaagactttcccacattaggacgaccaacaattgcagtagccaaaccattgcgcaagatttttccttcttgtgctgtcttcaataagcgattaattttatcaattactgatctagatgtgtctgccatctgttttgcggtaacagtatctgcatcatactctggataatcgatattaacctcaacgttagccaaagtattcagaatttcctgccgcattgcctgaatcttgtgtaacaatccaccagctaattgaccaacagccacttgtcgtgccttatccgtcttggcccgaacgatatccatcacactctcagcttgagttaagtcaattcgtccgttcacaaaagcacgtttagtaaattcaccaggatcagccattcgcgcaccgtgactcagcaacaattgtaaaatatgattagttaccacgattccgccatggcaattgatttctacaatatcttcacgtgtaaaggtcttgggcgcacgcagcactgtcaccattgcttcatcaatcgttttcccagtatccggatcgataatatgaccatagtgaatagtatgtgtcggcaccttgcttagatcttcgcctttaaaaacctcatcagcaatcttaattgcatcctcaccagacattcttacgattgaaattccgccttcaccgatgggggttgaaattgctgcaatagtatcgaactctgtcaaagtttgagccataattcttcccttttctcaataaaaaaagcgcattataccaccacgaataaccatgatggataaagcactttgactactttatctaaaaatcattttagactaatattcttttatttctttttgcgtcctaaacgcttgtaagcccttcttagtttacgtttgcgttcacgctcagcctcagcctttgcttcttgctctcttctatatttaatagggttttgcaagataaaggtttgaagcgcctggaacaagttggaaattacccagtaaagtgtaatagctgactggaagtttaaggccatcacaccaaccatgatagacattccgtacatcattactttggtcattccattttgcgatgattttggcgtcgataattgactaatatacgtcgataagaacgtaaagatcattgctaaaataggcatgatgtaatatggatcgggcttgcttaaatccatccataagaagcgcccagtttgtaactgcggtgtacgtaaaatcgcaccatacagtgcatacataactggcaactggatcaggacaggcaaacatccagtataaggatttacgcctgcttctttataaagcttgttagtttcttgttgtaataatgttcttgattcagtgtcacgtcctggatatttcttacgcaactcattaatttgtggttgaatgctttgcatcttagtagtacttcgaattgaaatagcattcaaaggtactaagatgacacgaacaatgacggtgaagacaataattgcccagccataactgttccccattaacttagctagccccaaaataaaagctgacatgtaataaacgatccaacggtcccaccaattaccacttgtatgtgagattggcgttgcttgaccatttgctcccgtagtagcacatcctgtcaatacaacagcaagtattgctactgctaagactgcaagaagacgtttgacatttctcttggtcagaatgtccttcaatctatttttcctcaactttatctggcatttcttcaataatatgagctaacgataatgcgtgaagcaagtttttacgcacctgagccatattaaaatcgcgagcataaggtcgcgtaatgattaaaaaatcaacatgcggattaatctgcaatttttcttcatcaatcacggcccgaatataacgcttgagtcgattacgtgcgactgcggtatgaccaacctttttgcccacagaaattcctactcgaaagtgtttattttctgttttttctaccttataaatgacaaaagctcggttagcgactgagtcgccagattcgaaaacttgctggaaatctttttcagattttactcgataagactttctcaaaacgtttcattccactctagtagactaaaaaaaccactgggattcagtggtttaagcagataagacttttctaccttttgcacggcgtcttgctaaaaccttacggccatttgatgtgctcatacgcttcataaaaccgtgaacacgtgaacggtgacgcttcttaggttggtaagttctcttagttgtcatattaaactgcacctccataaatttttgtgccaattgcacaatgtcttattaaggatagcacgaaaagccataaaaaccaagtattttaagaaaaaaagacttttaaatcccgtgaatattttctaaaaattcattgtttttcatgtggataaaaaataaaatatttttcttacgtataatttccacaagataatttccaacgttttccacaactcacatggtgttaaaaacttaattcacaccatgtggataacgcatatggtattttacctcaagtattgatagaatagtatccataattcacagctgtactgtgcataaattaacggttttgctcttatcatgtcaaaatgtgcatatcgctttaatagttgtcaacaggctgtgtactttgttgatttctttttcacctgtggaaaaccagttaagtaaatggtaaaataaatttgctttttactaactgggggaatgtaca

SEQ ID NO: 4 - DNA, 17387 bp, Lactobacillus crispatus
  source 1..17387: mol_type = genomic DNA
atgacaaaatcaacaaatttcaattactatgaagccgataacgtatatggagccttatttttccagtttcctaaggtattaatgtatggcgagcaatataaacatttaagcagtgatgctaaattggcttatatggtactgaaagaccggctcgagtattctttacgcaacaactgggttgatgagcaagggcacgtctactttatttttaccgttaaagaattacaagatttatttaactgcgctactgaaaaagccgttaaaatcaaaaaagaattgcaaacagccaatctattaaaacaaattcaaatgggatttaatcctaaaactaaaaagaatgaaccaaatcgtctatacctttctaaactcgatgtgaaagctactgatgtctatttaaggggcgaatatgggcaaaaaaagccggaatcccttactacgagcggaatttcgaaaatcgaaagtccgcatgacttcgttgaatcccttgctacgagcggaatttcgaaaatcgaaagtccgcatgacttcgttgacgacaaccctcaaacccttgctacgagcggaatttcgaaaatcgaaagcaatctatataaagactataaaaataatatagatactaatagatacgatatagatactcaaaagttggacttttccacaactaatttttcaccagctgaaattgaagcccaaaatcgagatctagtaaaacatgctgatgagttcttaactgacgaagataatgggttgccggtcttcttagaaccagaagcagttcaactacttagcttttggtgccgtaccccacaacaaatgcggcgctttattggcattatcttaaacgccaaatatgctgttgaaaaagagcataaggatttaggcgtatggattctattagacgatcctgatttaaaaaaaatgatgaccaaaacattaagacgctattttaatgctctaagaagcgacgagaagcatatcaagaatgttgagaactacctgtacggcaccatgcaaaacctatttggtgtttggtggaaccgacaagcagctagagaatatgcggccaaacaccccgaagaacagaatcttgatggcgagcgcgcttgggactaaaacgccatataagcccatttaagccacttcaagtgttacgcatatattttactaaagccactttaaaatcgcttagaagtaaaaacagataccttgagtgggcgaattggcgatagctaaactagaaaaatgggataggcgctttttaaatgaccaaaccaagcaaagaagttgaaaaaaaatgagcaattgttggctgacccatgggcagtcgatattcaagacatttgggagcaagcagcccaaaatcgagatcctgataaatgcaagctgtttgacgcgttatacacttacctcttagataaacgccaagaacaaatcatcaatgaaaagcactttttgatttaacatagacagttcaaataatcaatgattgaaataaaaaggaggcacaaaatatggctaagacacgaacatatatggacaagtatagattcacaactgcggaaaaccaacggtttgcccgagcaaattttaccaagttagtgcatactaatgctcgctttgaaggcgttaataccacattgccacaaacacaaactattatggacggtatgagcgtagcaggagtacctgttgaagatgttttgacgattgttaatttaaagcgtgggtggcaatatatcactactcaaaattcccctttaacgttaaccatggaaaaacaaatcaacaaaattgtggcagcagaagacgccttagtaccaggagaattacggcaagggaaagggggagttaatttaggtagtgaagacttttttgagccgcctttaattaacgaaaaacaggaacaatcctttttacaaaaaatcttgactgatccacgaacgacgattactgataaagcattgactgtcatgtatcataatatgcgtcaacaaatcttttgggacggaaacaaaaggacggcaactttaagtgccaataaaattatgattgacggtggcgctggtttaattaatatcccattagataagtgggatcaatggaacgaactaattgccaattattatcggactaatgacatgactgaagttaaaaagtggacatatgataatggtatccaaggattacaaattcggcaaacaaaaaattaagtgttaatcacaagtagtaaattatgtatttaatatatctaaatatgcctattaatgatataattgaccgcaaagaaagcaggtctatttttatgtcaagaatttataaagttggcgaagctgctaagcttctcggtgtatctcgctctaccatgcaaagatgggatcgagaaaaaagactagttgctcagcgcaatgttgccaatcgcagatactatacgcaagagcggctggatgcttttaggggcattaagcctcaccgcaagacagttgcttatgcccgtgtttcttctgtaggtcagaaagaaaatcttaggcatcagatggctttcatcattgaatatgccaatgctagaggcatcattattgatgaacatgtagaagatattggatcagggcttaattataaccgcaaaaaatggaataaattattggatgaagtagaagcaggaaaaatagaacgaatctttgttacctataaagatcgttttgcccgctttggctttgattggtttgaacatttttgtgctaagcacgatactaaaattattgttttaaacaaccctgaaacctctccagatgaggaaatggttgaagacttaatttcagtaattcatgtgttttcatgtcggctttatgggttgagacggtacggcaggaagattaggcgggatttaaagaaggaaggtgaaaagagtgatcatcaaaaccagaacatatcgattaaaacccaatcaaaggatgaagaaggttcttgattcgctttgtgattacagacgcttcagctggaatctcggtttagaaacctggcaaaatatgcatgaagccagacaattggctttaacccagcatcttaaagcagaacttaaaaagcctagaaaaaaacaaaagcttacaaacgctgaaagagaaattctcgcaaacaatcctgtcccttcctggcgcagaattcgtgatgagctgactgaaaacaagcaatactggcagacaaagcttccagctcatgtctttaatttggcgatccaagacttaggcaatgcttggcagaatttttttgataaagcgcagccaggctggggaaagccaaaattcaagtctaaaaaagcacctaggcagggatttaaaatggatcaggccaaaattaaggatggctgcttatttttagaaaagcctagggctgtcaaagaaacatggaacggctttaaattaagctctgctccattgtcggatgatttcggaacaatcagcttttacaaagaaaaaaacagatactatgcatccattccttttaaaatatctgatccagaagacaagcctaagacaggcagatatacaggcgtggatatcaatgttggacatttcaattacagagacggtcaatgcatagtaatgcccaaatcgttagcagcagtctattgcaaaatcaagcattatcaaagacagctgtctaaaaagcgtgtcgtcaatggtaaaatcaaaggaatgcaaagcaagcgctacatgaaagcgagaaacaagcttcaagcagcttacgctcgtgctaaaaatattcaaaatgatttgatgcagaaatttaccacaaagctggttagcgaatatgattctattgtgattgaagacctaagcgttaaaggaatgcttatgagtcatgttgcctccaaaggaatgcacaggtcaatgtttggcagatttagacagatattgacttataaatgcgaatggtatggcaagaaattgatcgtagccaataaactgtacccttcaactcaaaggtgcgcagcctgcggattagtgaaaaaaggcgatgaaaaaatcactttaagaggcaataagaagcatggcaccaagcataatgaatttgtttgttataatccgaactgccgtaactataataaaaaagttgaccgtgacgaaaacgccatgctcaacttaataattctggtaaaacatccagaattaaataaagccttataaaaagaatgcgggcgaagctacgtccgaaaaagaagtcaaaagagtcggtcaatgcgattactcccaagttggaatatcggaaaactgatgaagacgttgataagaaaagcataggcatgttaagccataatgactacaaataaatacaatgtagttgtttgcatatgtttttcatagctgctaatgaattgaaccagatgtacaagcaactaaaaaaacggataaattagaacttaaattagttcctgaattgtcaatttaagtgcaacagttaggttatgaagagatatattgcttgaagagttcttctgctgtgtgatattggaggattcggcgatgtttgtggttaatggcattagttgcctgttgaacatatgcagctgtcttatcgttcatgcttttgcctttagggaagaagacgcagaagaccgttgcagttttcatttgtgcctctttcccaaggtgaatatggatgagcgaagtagatctgacagtttttaattttagtcatatctgcaaactcagaaccattatcaaaagtaatagtcttgaaccaatctggatgctggtctatttctttttgaagcagtctttgacaagtacttgctcgataatctggtattttgatgacaatttcaaaacgagtagttctttctgtcagagtcatcaaagcaggctgatttttacgtctaacgcctttaacccaatctccttcccagtgaagaggagttgctctgtcttcaacttctttaggacgctgctcaattgaattgccaagattctttttatgcaaagcatgcccaccatgactatgatgccgtttgtttctgcgtcttttaagcttcattggcagatcaatattgcttatatctagcaaaccgcgatcaatatagcgataaacggtaggcgtgctggggcaaggatagcctggcatcgtctgcttgaactcacccacaaactcatcaatgctggtagcatcaaatttagttttaaaccgcttagacagcattttcagaaaaacagcataatgctttaactgatcacgcttatagcagttcttgcgtcgcttatcatgatagatctgcgcagtatcggcatagtaatgctcatagagcagatagttatgatctctttgcaggacgctgccacgtctgatttcacggctaattgtcgatttgtgacagccaacttctcgagcaatagcggaacaggaggttatgcctaaatcaagcagagcttgtatttgtcctcgttgtacactatttaattgatgataatgtctagagatgctagaatttgaattggtcatgaagattcaccttccttgatttttcgtcacttcaagtttaggtcttcatggcctttttgtttaacacttagcgttgcacttcaattttaaatccgggacttaccatttctgttagaattgcaacttgttctttggtaaatcgctgttgttttctaatatcacttaaatcttttgtccacttagaatttttttcattttcttctgctaacttcataagatgatgaattacttcagcattattttttaaatcgtgttcctctttataatcttgaatccaatctaaatctgtatcagaaattgtcgctctaaaagttgtcttaatcattttttctggtcctcttaatcagcgtaagtttcttgtctttttttcaaagcattatcaatcttttgattaattttttgtaactcttccagttctttttctttttgaacacctaacatggcattgaagaataagaacttataaagttgaccattattatcaaagcaatgttcttttctaatctgcctaatttcttcccattgcttatcgttgagtcgaaattgcaaaaagtgctgtcgtcccatttcttgccctctttctaaatttaatcatcttcttttgccgtgtcttctgacaaactatctaacaaatttaatgctcgttcggtgtcattaacatctccactaatgaaatactttgcaagaacattcagccctaataaattttcctgcagaagtttattctgcttctgaatcaataaactagtttgcgaatcttcattttgattttgaaaattaattggaatttgttcaatttgttctctcaaaaattgatttctggaaattttcttacttgaattttgatttaattgattaacaatccgatcaattctagccaagttttgttcgctgattccacggattaaaacttttaccataatttttctttcctctgatttctagtttctagttttccttctagtttctactctgaaatttgactaaaatctgcttcttttagttatctctagtaaagagcataagggaaatctgaccccacgccttttatcaaggtgtgctgggcttggttgtaccaagcgatttcgcatttttagaagtgatatcacttctgattaatttgacgtctgtatacttctaaattgttcgtcttttacctgacattacgtcttgatacgtaatgttttttagtgatatccgaacaggacgtattcttacgtagctcattacgtccaagacgtaacattttttgctctatttttgagtctagttatcaaaatttctattttttaactctaaaatttcttcaacattttcaaccaaaattcctaaagtcgacgcaatttctcttgtgcttttgccaatttcccgatattttttaactcgaaaaattaactcttgagaatattctacaggttccttatcacgctctatctctttaacttcaacatttctagcatgatacctctgcatcattttttgcaaagttccttcaagaatatcaaactgatttacaaattctttcgctaaaattttagaaaccctatttgactttttagcttcataaatcatttttctatatctctgcttagaagcccgagaagctttactatagaattcaggattatgaaccaacgcataaatcatcatttgcctatttaaattttcctcatggtcccaatctggcaaataaaagttttccagcatttctctaacttcctgaacataattttcaatttttgaaccacgcaactgcatttctaatcgccaaagtgaatcaacatttacaattcgtccatgcctttgttcttgttcaatttttttattatacaaacgaatttgtctctcacttgaacgcgcgccgaaatataccgtttgcaattccccattcttaccatagaaaaactttttagtcattccccagcgccatacctgataatactgaatctcagaatcattataaatatcaaaagctacatcacaacgtgaataatgcttattttgaatttttgcaataatttctctaagtagccattgaccagctggagtattcatcgaatgattgggattaaagtcaattctaatcttatctttttgaaacctaggaacttcaaaatatgcaacttgcccaggcgattacagacattaccggcagaattattcatttagacagctgccaggcataccggcatgacatgcggctgctgcgtgattagctgatatattataatttttccaattattgtaaatatcaattttatcttgtttggataatttagacataaataaaaaccccgaaattcttgtccgaatttcggggttcatatcaataaacactttagctgcttttctattattaaactaaatcatacatttctggcattctgcaccattttgaattaaacattcgtctgcagtcaagttctcactaccagctaaaactttttctcttattctaacataataaattgagttgcagcgctttttaaaggcataaatataagccttatttaaatctcttgttgttgcattatcttcaacaaataaagttaacgaaattgattgatcaacatacttttgtgcagcagctgtaatatcaataatagcattaggtcctacttcatatgcacccttttcgtaatactcataattgtctttattaatcttataagctggtacataaattcgacccaaatcagcctctttgcgtgtttcaacaggagctactactggctgcaaacttggtgtacatgaagataaataactaattgatccagtaggtgcaactgctaacaagttagcattagctatacctgtctttttaattttagtaatcaattcttcccaatcttctttagttggaataactaatttatatttagctacaatttctttaatcttgtctgttttcggtgagacttcctcatcaataaattttttgaaataatcaccactagcatatgatgaatctttgaatcctttaaaagcaccatacttttcagctaatttatttgattctttaaatgcatggtatgcaattgtataaaagaaaattcctgtaaattcaactgcttctggtgaatcataataaatatgattagttgctaaaaagccatgtaaattcattgctcctagaccgattgctcgattagctttatttcccttttcaattgaaggagcacaatctaaatctgaagacctggcaacacgattaagcgcttgaacactatcagaaaccaaaccacctaacttgtcagcgctattcattgctgctgcaatattaagtgatcctaaattacaacaaacatcgtagcccgtcttattaaaacttaagtcttcattataggtacttggcgtattaacctgagcaatttctgaacataaattagacatcacgatccgccccaatttcttttgtgggtttcttcgattgacagtatcttcatacataatatagggataccctgattcaaattgaacttcagcaatagtttggaagaattttctagcactgataaatgtctttttaatacatggattattaaggagattttggtattctttagtaattgaaatatctgacattggtttaccatattcacgtttaatatcatatggtgaaaacaaagccatctttttattttctttggctagttcaaaagtaatatctggaatcactacgccaagtgataaagatttaattcttaccttttcgtcagcgttttctcgtttagtatctaaaaattgcagaatctggggatgatgggcacttaaataaactgcaccggcaccttgtctttgccctaattgattggcataagaaaatgaatcttctagtaatttcattacaggaattatcccactagataaattcttcatttttttaataggtgcacctaattcacgcaaattagttaagcatagagcaacaccaccaccacgtttagataattgcagacttgtgcttattgctcgtgaaattgattccatattgtcttcaactctgagcaaataacatgaaacatattcaccgcgtctctttttacctgcattcaagaaagtcggagttgctggctggaaacgattactaataatatctttaactaaattcaaggccagttcttcattgccatcagctaaaaataaagcattcataacagcccgatcttcaaaacgttctaaaaattgtttattatcgtttgtttttaaggcatatgctttatagaatttagctgcacccataaagttcaaaaagctaaaattttgcgcataagctaatttgaaaatttctttaataaatttagctgtatataaatctagaacttttttatcatagtaattattatcaactaaataagctaatttttcttctaaagaagcaaactttttcattcttggttcaatatgattttcaagatattgcttagtagcttccttgtcagctttaaaattataatttcctttttcatctttaaatttagcaagtgcatttaaagaaatatatgaatcattattaagatgatcagtcattgtcctcacctgcatcagcaattattttattaacattatttacatcttcagttgttcccagtaactcaaatttatatagataaggaacatgtaatttcttagaaattacatcccctgccaaggcaaaagaattaccaaaattggtatttccactagcaataacaccaatacatttttgccgattagccaatttgttcaaaaagtggataacttgctcaggcacagcacctgtagtcccatggccaccagaataagttggcgtaattaaaatatattcttcagaaactgaaatttctttactgagtttaataggaatcctaatagaattacaatctaacttttctacaaagcgtgctgtattatttgaagtggaagaataatagacaactaatggctttttagaaatcccagtcatcatctttagtctcctctcctgttcccattacatatgaagaaccattaccagaaaagaaatcatggttttcatcagcttgagctgataattgagcgaatacttctggggaaatataagtttcttctgcggtaaaaggagtatcatagcctaaattttgtaaaaatttacctgcattatacaaactgaaatgaattgcatcatcaaccaaatcaaaatcatcataaagctcgtgcaaatatttcttttccaaatcaattagtttatctaagaaatcaaaaacgaattttttcatttctgcttgtttagctggagctaatttctttacggccaattgatatttgtaaccactataataattgtgaataaccttatctcttaagatcaatctaataatatcagcagtattaggcaatttacctcttgcagctaaataaaatggtaaataaaaaccaccataaagcaggaaccctggcataattgctgcggcaacctttgatttaagcggatcattgcctgtataatacggaattaccgctttagctcttgcttgtaaagcatcattattaactacccattcatgcgcttcttcaatttgttcactagtacataaagtagaaaaaatagttccatatgatcttgcatggacagcaaccataaaagcaaaatttgcatagatagcttgctctatatcagtttgtgaatttttaatttgggctacatcacccacacttgattgagttgtatctaataaagtcaatccagtgaaagtgcgagttataagctgttgccagtcatcagataattgattccaagaacttatatcattcgaaactgggattttttcaggtaaccaaaagttttgagtaactctgttccaaacctcaagatccttatcatctttaatgtcattccagttaatagctcgcatatttttgccgttgttattgtaagcaaattcaactggtgactgtgaatgatcataataactcatatttgtatttgctcctatcattatttattgttttatctaatatttgtgtgaacataatatagcatcttctgctcaataatacaacatgtggatttttggctatttataatcaatatattgtggctaagccgttttgataatacaaaattattttcaaatttattttatcttccaaaaataatgtaggtgttgttttttgcttttttgacaaaaaaatctccctgaattgtcaaattaagtgcaacagttaggctatgaagagatatactgcttgaagagttcttctgctgatagcgctgaaatttcaaatagaattaataccgataacgatcaggatcaggatcagcaaggtgataatgcggaaacaaattttgaatattccgatgatcgtgatggagatgaccaataaataattaaaaaaaggagtagacaaaatagcattaagtcagaaattagctttgaataatgattttcaaaacaaaaaagccctgctattatgcagagccaccgcgcgttcgcaagttatcgtcttgctgcgcatgcatccatgatcattggacgcgacaattttcctacatgtattataacatgctaaaataaaaatgcatgtcattcatgcacattctagggttggctcaatcaaccaccctataggaggtgagagacgttggacgacatgacaattttcctaatttgcgttctgctacatgagctccatttagttcttcgggaactaaataatctacttgataagtagtcatcattagtagacgcgaccagagtcatcggcagttgtatagtcggtgacttttttattttgcattctttaattctctaaagcgtcgataaattggtgttttggagatccctaatttcttgctgatttcagaatagctcctgtatgcaacctccaggcaaaatcaatttgttctggagtgtactttcgaagcataccatcatggaggttggtattattagctttcgctcatgccttgttttcccaagatgaaaaagtgcgacagatcaacgcttttttatttttttggtcaaattttagaaatatgctaaataaaaaaagcggtcaaacgaccgcccacgttttgcatgcctcgttcatgtcgacagcataacactaatcctttaatcattataacatgataaaatagttatggcatgcttttgtgcccctacactgctgtaaaaggctagaaaggagctgtatcatgtcagatgttgtaacactaatcctaacaatcgcacttttgaatgaattacatttagtccttcacgaactaaaccagctattaaagcactagtgcaaaaagtcgtccttcggggcggcttttttgtctcttaactctctaaaacgccggtagatagttgcttttgacatacctaatttccgactgatttcagaatagctcatgtggtcttgagtatggagcttccacgcaaaatcaatttgttctgaggtgtactttcgaggcataccatcatggaagttaggattattggcttttgcccatgccttgccttcctgggttcggttcacgataagatcacgttcaaattctgcaaatgcactgaatacagtgaagattagacggccacttggtgaattatcaatcgtaccaatatttaagacgcgtagaatgattccctcagcatttaattgtttaacaatgttcaatgcgtcctgagtattacgtgctagtcgatctaatttggtgacaattagggtatcaccactaccaatttgagccatcaatttatcgaattctggtcgatttgctgtggtgcctgtgtatttatccttaaagattttggtcgctcctgcctgttttaggtcttcaacttgagttgcatagtcctgctgagtagttgaaacacgagcatagccataaatggtatttgtcatatatttcctttcaattatgaatacaagttatgaatatggcttatgccctatcttagaagattctacttttgtattcaagactttcaacttttgattacaaaacaaaaagcagtttctaaaaagaaactgcttaagtattattattttcaataattaccatttaatgttagaaatagaagatcaaaagtagagaatgaaaatgtaaaagtaggagtagagaataaaaatgagaaaaaagggctggctctttctaacagccagtcagagtactcaaatctgagacaaaatgtaaaaattagcatagatcgattaacaattgttggagatttttcgacagagctttttaaaaaattagttcgtaaatggctgactttttcttttattagatcttcgggagctggttttgaggtattagattattcaaattgcaggtttgatgatttcggtaatccacatgaggaaattccgcctgggcttttaaaacgtgctgttttttcttgccggaataataagctgcttgtctttttttgggcgttgaatctttacttcagtggcatcgattaagacaacatcgtctggcttgatttcttgcttgccaatgttaaagccatgcttagccaaagtctcttcggcccagtggcttcttctgatcaggttgctgtcatgcacaccgtaatcggcagctatttgttcataagtacggtattccttgaggtactgcaaagtagccagaagcaggtcttcaattgccagcttgagctttctgccgcctcgggcatgcttgacttgatattcggcttttaatactttgaccatttcgtcaaagacaggcttggcaacgccgatcagacgcttgaatctggtattgtttaaatttttagctgtttcgtatttcataatttaagattatagcagatgtttcgcagtaactctattaactaaagaaacaaataatgaaaggcatggttggctttggaaaataacgcattagctaataacgtcaaaatacgctgaactgagtttgtcgaaataccggtgagactggcgatagtcttagccgggagtgatttactggctagcttcagcacatgagtcgctagtccgtgaccgatggcgtggttggttgataccactggagtggtggccgtacaagtgctatggcagttactacaacgccagcgttgcttgtttagctctagaattacgggccggtccatggatcctgcaatgtggacatgagtgagcttgtgtccgttagggtgcaacatattgtatccacagctgggacagcgcctgagtgtgtaggtaagctctgcctggatgaccaaatactttttgcgacccgagccccgaccatgaaattcctcacgagtaccgaacacccgaatgtttgtgtctgtaactcccagtaatttaagtgtattatctagttgagacatctattcctacccccgcttatcttgagtttcgtcgcttaaagcatagcactagggaggcttagatgcctttttttgttatcaaaaagggcctagtacttttggaatggaaatactttccaacaccaaaaattctagacccctaaatttgcgatctaccacgtatgtttaaatcaaatttattttaaatacgcgtggtgctagttaaatcgttttagttaataaaagttgtaggtaatttaaatagaaaagagtctgatctaattgaactatctcaagcttaagcgtttttctcaccatttacaagttagttttaatcggttaaatgtgatttgtcgctcgctatataagctttatgcgcctgatggacttaaacatcgtaaaaatgttgatcagaccaagcttcctgatagttctatcttagcgatgctcatttggcaaactgaaattggaattgaatctcaacgaagattctgtaaattcttcgttggcttatctcattctcgttttaaccgtcgagctcgaatgctcttgcctctaattcgttgtatccgtcaggcttggaatcaagaagtaaagacagctggagaatttttgattattgatagtttcccagtgccagtttgccagcctgtttgcaattatcgtgtcaagatctttcggggcgtagctgatattggttataaagcaaccaagaaagtctattattatggcttcaaggtccacgcaatagtaagcgatgatggcaattagaaaaagcattgaaagcgacttttctttgcttagttattacaacgctgagaataatcgagcaagaagtccagtaggctttcaacagcggctagaaatagctattttagcttataatatggcatattgtctagaacgatttaactagcaccacgcgtattttaaatataccttgtacagtgaagtttattgattgtgtgatttatgataaaagattaatcttttatcataaatcacacaatcagtaatacataagttaagctcaatcttatttacgtttggcaaggccttcacgaataattttttctaagacatcaacaatttttttgtcattctcaaaagcgatgcgtttaacttctttatatgtgctcatgcgaagttgaacggttttagttctttctgtttcgaattggtatggactttttagatttttaagttgttcagatgcctttttactaactttgtttaaaaaatcttctgccatgataaattactcctctaactgttgaattctaagtagttgttcattaagaaccatttggtacatttggattgctcttttatcccaatggtctttattccgtattccttcattagcaaacgttttaacccgttcttgagttctaattgagtttgaaaagaccccttcgccaaaaaagtcttttgcttgtgcagaaatttcagtatcaacttttgcacgtggcttcattaagtacaatatgacaccaactaactgaaaacttccattgtattgttcacgtagttcacctaaatgcgtagctgtttttaaagaacttgtatatgactgcttttgagtttgtaagacaattgagatgaaatctgaagccatgattgcgttattagtaaagacatttattgttggtggtacgtcaataaaaatataatcgtaattttgttttaattttgaaagcatttgtggtaatagaatattacgtttaacccgactaactttttctacagcaccaatccataaagacaatgtccaatctgtaggaatcatatcaatttggtttgtaacagacacaatagatttagacaaattccctccaagaaggccctcatataatgaaagttccggctttaaatcggctttataagtctccttcataatttcagttgcatttccctggggatcgaaatctatcagtagtacttttttcccctcttgacccaataaataggtttccattacagtcaaggtggtcttaccaacgccacctttaaagttgaagtttaatagtgttttcccattcatagtagcacctacctttacataaacattttaccatgatttatgattaatcgcaaattttatatgatttatgattaatcataaatcatatccatgaaaatatttacttaacctttgcagaatgatatgctttgttcataaacaaaaaatcccaatacactcgggattgggatttttgcagtattgacaagtagctatcttgcagctacctagtccaagcaattttcaccgccgagttaaaattgcttgaacaaattgtaatcttgtttacgtgctaattataccgcaagcaaaccttaaagggcaagcaaaggtaaactaattaaaacgaagacaagaccaatggactaagtagcttctaataactacttagtccatttttagttcttaaaaattaaaaaagttgccgactgggcaacccagaatagacacatgctggtgaaactacaaagccgatcacgaccaatatccgctttgtaattctattaaagcatatcagatttgtattttaaagcaagtcagatgttttagcaactctcttttgagacagcgtgtgtcagtcaagaaagggagtttttatt
